(19) United States
(12) Patent Application Publication
(10) Pub. No.: US 2023/0097513 A1
(43) Pub. Date: Mar. 30, 2023

(54) POXVIRUS-BASED VECTORS PRODUCED BY NATURAL OR SYNTHETIC DNA AND USES THEREOF

(71) Applicant: CITY OF HOPE, Duarte, CA (US)

(72) Inventors: Don J. DIAMOND, Glendora, CA (US); Felix WUSSOW, Glendora, CA (US)

(73) Assignee: CITY OF HOPE, Duarte, CA (US)

(21) Appl. No.: 17/759,254

(22) PCT Filed: Feb. 2, 2021
(86) PCT No.: PCT/US2021/016247

§ 371 Date: Jul. 21, 2022

Related U.S. Application Data
(60) Provisional application No. 63/112,803, filed on Nov. 12, 2020.
(60) Provisional application No. 62/969,628, filed on Feb. 3, 2020.

(51) Int. Cl. C12N 15/86; A61K 39/00; A61P 35/00; A61K 39/245; A61K 39/215; A61P 31/14; A61P 31/22

(52) U.S. Cl. CPC C12N 15/86; A61K 39/001151; A61P 35/00; A61K 39/245; A61K 39/215; A61P 31/14; A61P 31/22; C12N 2710/24152; C12N 2710/24143; C12N 2710/24134; A61K 2039/5256; C12N 2710/24171; C12N 2770/20034; C12N 2770/20071; C12N 2710/16134; C12N 2710/16171

(57) ABSTRACT

Disclosed are methods of producing poxvirus-based vectors or recombinant poxvirus-based vectors from naturally derived, chemically synthesized DNA fragments, or a combination of naturally derived and chemically synthesized DNA fragments. One or more DNA sequences encoding one or more antigens, subunits or fragments thereof or other heterologous gene sequences are inserted in one or more poxvirus insertion sites in one or more DNA fragments. The methods include transfecting a host cell with one or more circular or linear DNA fragments such that a poxvirus or recombinant poxvirus is reconstituted in the host cell, the reconstituted poxvirus or recombinant poxvirus comprising the genome of a desired poxvirus. Also disclosed are poxviruses or recombinant poxviruses produced by the technology and uses thereof.

### PRIORITY CLAIM

[0001] This application claims priority to U.S. Provisional Patent Application No. 62/969,628, filed Feb. 3, 2020, and U.S. Provisional Patent Application No. 63/113,803, filed Nov. 13, 2020, the contents of which are hereby incorporated by reference in their entirety.

### SEQUENCE LISTING

[0002] The instant application contains a Sequence Listing which has been submitted electronically in ASCII format and is hereby incorporated by reference in its entirety. Said ASCII copy, created on Feb. 2, 2021, is named 8200WO00_SequenceListing.txt and is 652 kilobytes in size.

### BACKGROUND

[0003] Poxviruses are large double-stranded, enveloped DNA viruses that replicate entirely in the cytoplasm of infected cells by encoding their own enzymes for DNA transcription and replication^{20,27}. One of the greatest achievements in medical history was the eradication of the causative agent of smallpox (Variola virus) by mass vaccination with replication-competent, attenuated Vaccinia virus vaccine strains. Vaccinia virus is used as the prototype member to study poxvirus replication and has been further developed to generate recombinant vaccines and oncolytic agents.

[0004] Modified Vaccinia Ankara (MVA) is a highly attenuated orthopoxvirus that was derived from its parental strain Chorioallantois Vaccinia Ankara (CVA) by 570 passages on chicken embryo fibroblasts (CEF)¹. As a result of the attenuation process MVA has acquired six major genome deletions (Del1-6) as well as multiple shorter deletions, insertions, and point mutations, leading to gene fragmentation, truncation, short internal deletions, and amino acid substitutions². While all of these mutations are likely to contribute to the highly-attenuated phenotype of MVA, the precise genetic determinants that are associated with the MVA assembly deficiency remain obscure^{2,3}. MVA has severely restricted host cell tropism, allowing productive assembly only in avian cells, e.g. CEF and baby hamster kidney (BHK) cells, whereas in human and most other mammalian cells, MVA assembly is abortive due to a late block in virus assembly^{4,5}. Although non-pathogenic and highly attenuated, MVA maintains excellent immunogenicity as demonstrated in various animal models and humans^{6,7}. In the late phase of the smallpox eradication campaign, MVA was used as a priming vector for the replication competent vaccinia-based vaccine in over 120,000 individuals in Germany and no adverse events were reported⁸. In the past decades, MVA has been developed as a stand-alone smallpox vaccine and is currently pursued by the United States (US) government as a safer alternative to substitute the existing vaccinia-based vaccine stocks as a preventative countermeasure in case of a smallpox outbreak⁹⁻¹¹. The FDA approved MVA, under the trade name Jynneos (Bavarian Nordic) on Sep. 24, 2019 to prevent both smallpox and monkey pox. Previously, the identical MVA vaccine using the trade name Imvamune was approved in Europe as a smallpox vaccine.

[0005] All currently used MVA vectors or derivatives thereof are licensed or owned by academic, commercial, or governmental entities, which greatly restricts their use to develop MVA-based vaccine vectors. Therefore, there is a need to develop alternative MVA vectors for various research, prophylactic, and therapeutic uses. In addition, novel technologies are urgently needed to accelerate the development of recombinant poxvirus vectors for pathogen preparedness and disease prevention.

### SUMMARY

[0006] In one aspect, this disclosure relates to a method of producing a poxvirus vector or a recombinant poxvirus vector. The method entails the steps of transfecting one or more DNA fragments into a host cell, wherein the one or more DNA fragments comprise the entire genomic DNA sequence of a desired poxvirus, such that the poxvirus is reconstituted in the host cell. In certain embodiments, two or more DNA fragments are co-transfected into the host cell, each DNA fragment comprises a partial sequence of the poxvirus genome such that the two or more DNA fragments are assembled sequentially by homologous recombination and comprise the full-length sequence of the poxvirus genome when reconstituted in the host cell. In certain embodiments, the method further entails infecting the host cell with a helper virus before, during, or after the transfection of the one or more DNA fragments to initiate the transcription of the one or more DNA fragments. In certain embodiments, the helper virus is Fowl pox virus (FPV), sheep fibroma virus, vaccinia virus, or cowpox virus. In certain embodiments, the one or more DNA fragments are circularized before transfection or transfected in circular forms into the host cell. In certain embodiments, the one or more DNA fragments are cloned into a plasmid or a bacterial artificial chromosome (BAC) vector. In certain embodiments, the one or more DNA fragments are linearized before co-transfection or transfected in linearized forms into the host cell. In certain embodiments, the one or more DNA fragments are naturally derived, chemically synthesized, or a combination of naturally derived and chemically synthesized DNA fragments. In certain embodiments, the poxvirus genomic sequence comprises the sequence of Modified Vaccinia Ankara (MVA) Accession No. #U94848 or #AY603355. In certain embodiments, the poxvirus genomic sequence comprises the sequence of Vaccinia virus genome. In certain embodiments, two adjacent DNA fragments have an overlapping sequence to facilitate homologous recombination. In certain embodiments, the overlapping sequence is between about 100 bp and about 5000 bp in length. In certain embodiments, the one or more DNA fragments further comprise an inverted terminal repeat (ITR) region. In certain embodiments, the one or more DNA fragments further comprise a poxvirus terminal hairpin loop (HL) sequence, a poxvirus genome resolution (CR) sequence, or both, wherein the HL or the CR sequence is added to one or both ends of the DNA fragment as single stranded or double stranded DNA sequences in sense or antisense orientation. In certain embodiments, the one or more DNA fragments further comprise one or more HL sequences and one or more CR sequences. In certain embodiments, each HL sequence is flanked by two CR sequences at both ends of the HL sequence. In certain embodiments, wherein only a subset of the one or more DNA fragments comprise the HL or CR sequence. In certain embodiments, the one or more DNA fragments further comprise one or more DNA sequences encoding one or more antigens, subunits, or fragments thereof or other heterologous DNA sequences. In certain embodiments, two or more DNA fragments comprise the DNA sequence of the same antigen, a subunit or fragment thereof or the same heterologous DNA sequence. In certain embodiments, two or more DNA fragments comprise the DNA sequences of different antigens, subunits, or fragments thereof or other heterologous DNA sequences. In certain embodiments, the DNA sequences of the antigens, subunits, or fragments thereof or other heterologous DNA sequences are codon optimized for expression in the host cell. In certain embodiments, the one or more DNA fragments further comprise a virus promoter upstream of the DNA sequences of the antigens, subunits, or fragments thereof or other heterologous DNA sequences, a transcription termination signal downstream the DNA sequences of the antigens, subunits, or fragments thereof or other heterologous DNA sequences, or both. In certain embodiments, the DNA sequences encoding the antigens, subunits, or fragments thereof or other heterologous DNA sequences are inserted in one or more poxvirus insertion sites such as intergenic regions, non-essential genes and regions, and deletion sites.

[0007] In another aspect, disclosed herein is an expression system comprising: (i) a single DNA fragment comprising the entire genome of a desired poxvirus, or two or more DNA fragments each comprising a partial sequence of the genome of the desired poxvirus such that the two or more DNA fragments, when transferred into the host cell upon co-transfection, are assembled sequentially and comprise the full-length sequence of the poxvirus genome and enable reconstitution of the poxvirus, and (ii) one or more DNA sequences encoding one or more antigens, subunits, or fragments thereof or other heterologous DNA sequences inserted in one or more insertion sites of the poxvirus, wherein the antigens or subunits thereof or other heterologous DNA sequences are expressed in the host cell upon transfection of the one or more poxvirus DNA fragments and reconstitution of the poxvirus. In certain embodiments, the one or more DNA fragments are circularized before transfection or transfected in circular forms into the host cell. In certain embodiments, the one or more DNA fragments are cloned into a plasmid or a BAC vector. In certain embodiments, the one or more DNA fragments are linearized before transfection or transfected in linearized forms into the host cell. In certain embodiments, the one or more DNA fragments are naturally derived, chemically synthesized, or a combination of naturally derived and chemically synthesized DNA fragments. In certain embodiments, the genomic sequence of the poxvirus comprises the sequence of MVA Accession No. #U94848 or #AY603355. In certain embodiments, the two adjacent DNA fragments have an overlapping sequence to facilitate homologous recombination. In certain embodiments, the overlapping sequence is between about 100 bp and about 5000 bp in length. In certain embodiments, the one or more DNA fragments further comprise an inverted terminal repeat (ITR) region. In certain embodiments, the one or more DNA fragments further comprise a poxvirus terminal hairpin loop (HL) sequence, a poxvirus genome resolution (CR) sequence, or both, wherein the HL or the CR sequence is added to one or both ends of the DNA fragment as single stranded or double stranded DNA sequences in sense or antisense orientation. In certain embodiments, the one or more DNA fragments further comprise one or more HL sequences and one or more CR sequences. In certain embodiments, each HL sequence is flanked by two CR sequences at both ends of the HL sequence. In certain embodiments, only a subset of the one or more DNA fragments comprises the HL or CR sequence. In certain embodiments, the one or more DNA fragments further comprise a virus promoter upstream of the DNA sequences encoding the antigens, subunits or fragments thereof or other heterologous DNA sequences, a transcription termination signal downstream of the DNA sequences encoding the antigens, subunits or fragments thereof or other heterologous DNA sequences, or both. In certain embodiments, the DNA sequences encoding one or more antigens, subunits or fragments thereof or other heterologous DNA sequences are inserted in one or more poxvirus insertion sites.

[0008] In another aspect, disclosed herein is a vaccine composition for preventing or treating cancer or an infectious disease comprising: (i) a single DNA fragment comprising the entire genome of a desired poxvirus, or two or more DNA fragments each comprising a partial sequence of the genome of the desired poxvirus such that the two or more DNA fragments, when transferred into the host cell upon co-transfection, are assembled sequentially and comprise the full-length sequence of the poxvirus genome and enable reconstitution of the poxvirus, and (ii) one or more DNA sequences encoding one or more antigens, subunits, or fragments thereof or other heterologous DNA sequences inserted in one or more insertion sites of the poxvirus, wherein the antigens, subunits or fragments thereof or other heterologous DNA sequences are expressed in the host cell upon transfection of the one or more DNA fragments and reconstitution of the poxvirus. In certain embodiments, the antigens, subunits or fragments thereof or other heterologous DNA sequences are inserted in one or more poxvirus insertion sites. In certain embodiments, the vaccine composition further comprises a pharmaceutically acceptable carrier, adjuvant, additive or combination thereof.

[0009] In yet another aspect, disclosed herein is a method of preventing or treating cancer or a viral infection in a subject comprising administering a prophylactically or therapeutically effective amount of a vaccine composition to the subject, wherein the vaccine comprises: (i) a single DNA fragment comprising the entire genome of a desired poxvirus, or two or more DNA fragments each comprising a partial sequence of the genome of the desired poxvirus such that the two or more DNA fragments, when transferred into the host cell upon co-transfection, are assembled sequentially and comprise the full-length sequence of the poxvirus genome and enable reconstitution of the poxvirus, and (ii) one or more DNA sequences encoding one or more antigens, subunits or fragments thereof or other heterologous DNA sequences inserted in one or more insertion sites of the poxvirus, wherein the antigens, subunits, or fragments thereof or other heterologous DNA sequences are expressed in the host cell upon transfection of the one or more DNA fragments and reconstitution of the poxvirus. In certain embodiments, the antigens, subunits, or fragments thereof or other heterologous DNA sequences are inserted in one or more poxvirus insertion sites.

### BRIEF DESCRIPTION OF THE DRAWINGS

[0010] This application contains at least one drawing executed in color. Copies of this application with color drawing(s) will be provided by the Office upon request and payment of the necessary fees.

[0011] FIGS. 1A-1C show the design of the sMVA construction. FIG. 1A: Schematic of MVA genome. The MVA genome is approximately 178 kbp in length and contains an internal unique region (UR) flanked by large ˜9.6 kbp long inverted terminal repeats (ITRs). FIG. 1B: Schematic of sMVA fragments. Each of the three sMVA fragments is approximately 60 kbp in length. sMVA fragment 1 (F1) contains the sequence of the left part of the MVA genome, including the left ITR; sMVA fragment 2 (F2) contains the sequence of the middle part of the MVA genome; and sMVA fragment 3 (F3) contains the sequence of the right part of the MVA genome, including the right ITR. sMVA F1 and F2 as well as sMVA F2 and F3 share ˜3 kbp overlapping sequences for homologous recombination (dotted crossed lines). Indicated are the approximate positions of commonly used MVA insertion sites, including Del2, IGR44/45 (44/45), and IGR64/65 (69/70) within sMVA F1, IGR69/70 (69/70) and the TK insertion site within sMVA F2, and Del3 within sMVA F3. FIG. 1C: Schematic of the terminal HL and CR sequences. Each of the sMVA fragments contains at both ends a sequence composition comprising a duplex copy of the MVA terminal HL and flanking CR sequences to promote genome resolution and packaging. SfiI and FseI restriction sites are included as indicated at both ends of each of the sMVA fragments to release the fragments from the bacterial vector backbone (pCCI-Brick) with or without the terminal CR/HL/CR sequences by enzymatic digestion.

[0012] FIG. 2 shows reconstitution of sMVA. A schematic for the generation of sMVA (sMVA) using the three sMVA fragments (F1-F3) as shown in FIG. 1 is depicted. The three sMVA fragments are stably maintained in E. coli, then isolated from the bacteria and transferred by transfection as circular or linearized DNA molecules into MVA permissive BHK or CEF cells. The transfected cells are subsequently infected with Fowl pox virus (FPV) as a helper virus to initiate MVA genome transcription and replication and consequently the reconstitution of the viral form of sMVA.

[0013] FIG. 3 depicts the construction of recombinant sMVA with one antigen. A schematic is shown for an example of the construction of recombinant sMVA (rsMVA) with one introduced antigen sequence, heterologous gene sequence, or other genome alteration. The antigen or heterologous gene sequence (black circle) is inserted into the MVA genome sequence of F2 (or one of the other sMVA fragments (F1 or F3)) by bacterial recombination methods in E. coli using linear PCR-derived products or other forms of linear DNA constructs. The modified sMVA fragment F1 and the unmodified sMVA fragments F2 and F3 are isolated from E. coli and co-transfected as circular or linearized forms into FPV-infected BHK or CEF cells to initiate the reconstitution of rsMVA expressing one antigen or heterologous gene sequence. Nucl.=cell nucleus.

[0014] FIG. 4 illustrates the construction of recombinant sMVA with three antigens. A schematic is shown for an example of the generation of a recombinant sMVA (rsMVA) with 3 introduced antigen sequences, heterologous gene sequences, or other genome alterations. An antigen or heterologous gene sequence (shown in square, circle, or rectangle) is inserted into each of the three sMVA fragments (F1-F3) by bacterial recombination techniques in E. coli using linear PCR-derived products or other forms of linear DNA constructs. The modified F1, F2, and F3 sMVA fragments are isolated from E. coli and co-transfected in circular or linearized forms into permissive BHK or CEF cells, where rsMVA virus expressing three antigen or heterologous gene sequences are reconstituted in the presence of FPV as a helper virus. Nucl.=cell nucleus.

[0015] FIG. 5 illustrates the sMVA reconstitution process. A schematic is shown for an example of the tissue culture reconstitution process of sMVA or rsMVA using the three sMVA fragments (F1-F3) or modified forms thereof. BHK cells seeded in 6-well tissue culture format are co-transfected with the three sMVA fragments (unmodified, modified, or a combination thereof) and subsequently infected with FPV as a helper virus to initiate the transcription and replication of the sMVA fragments and, consequently, the reconstitution of sMVA virus. The transfected/infected BHK cells are transferred every other day (at 2, 4, and 6 days post transfection/infection (dpt/i)) into larger tissue culture formats as indicated to promote sMVA reconstitution. Plaque development and progression can be detected after the day 2 and day 4 cell transfers, resulting in 90-100% infected BHK cells at 7 or 8 dpt/i after the day 6 transfer.

[0016] FIGS. 6A-6B show sMVA infectivity analysis. FIG. 6A is a plaque analysis showing representative bright field microscopy images of 5 individual plaques in BHK cell monolayers infected with sMVA or MVA NIH clone 1 at 1 day post infection (dpi). FIG. 6B shows the progression of infection. Shown are representative bright field microscopy images of BHK cell monolayers infected with sMVA or MVA NIH clone 1 at 1, 2, and 3 dpi. Mock-infected (uninfected) BHK cell monolayers were analyzed as control. Plaques and infected areas were visualized by immunostaining for the Vaccinia virus B5R protein.

[0017] FIGS. 7A-7L show PCR analysis of the reconstituted sMVA. BHK cells were infected at MOI 5 with sMVA virus reconstituted from the three sMVA fragments (F1-F3) or MVA NIH clone 1 and DNA extracted from infected BHK cells was evaluated by PCR. DNA extracted from mock-infected (uninfected) BHK cells (BHK) as well as H₂O only (Ctrl) was analyzed for control. The PCR analysis included sequence detection of the inverted terminal repeats (ITR) (FIG. 7A); the transition from the left ITR into the internal unique region (LITR/UR) (FIG. 7B) and the MVA Deletion 2 site (Del2) (FIG. 7C) located in sMVA F1-derived DNA; the intergenic region (IGR) between MVA 69R and 70L (IGR69/70) (FIG. 7D) located in sMVA F2-derived DNA; the MVA Deletion 3 site (Del3) (FIG. 7E) and the transition from the internal UR into the right ITR (UR/RITR) (FIG. 7F) located in sMVA F3-derived DNA; the reconstitution of the recombination site of sMVA F1 and F2 (F1/F2) (FIG. 7G) as well as of F2 and F3 (F2/F3) (FIG. 7H); and the MVA genome positions containing the five nucleotide polymorphism (Polym. 1, 2, 3, 4/5) (FIGS. 7I-7L) specific for MVA strain Antoine. The expected PCR products are indicated by the arrows at the right side of each panel. The expected sizes of the PCR products are given in the brackets below each panel.

[0018] FIG. 8 shows reconstitution of sMVA with a single fluorescence marker. Shown are representative immunofluorescence and bright field microscopy images of BHK cell monolayers at 6 and 7 days post transfection/infection (dpt/i) using unmodified sMVA fragments F1 and F3 and modified sMVA fragment F2 with inserted red fluorescence protein (RFP) marker (F2-RFP). The sMVA reconstitution procedure from these fragments is illustrated in FIG. 5 and FPV was used as a helper virus. Mock-transfected/infected BHK cell monolayers were analyzed as control.

[0019] FIG. 9 shows reconstitution of sMVA with double fluorescence markers. Shown are representative immunofluorescence and bright field microscopy images of BHK cell monolayers at 6 and 7 days post transfection/infection (dpt/i) using unmodified sMVA fragment F1, modified sMVA fragment F2 with inserted red fluorescence protein (RFP) marker (F2-RFP), and modified sMVA fragment F3 with inserted blue fluorescence protein (BFP) marker (F3-BFP). The sMVA reconstitution procedure from these fragments is illustrated in FIG. 5 and FPV was used as a helper virus. Mock-transfected/infected BHK cell monolayers were analyzed as control.

[0020] FIGS. 10A-10H illustrate various examples of rsMVA HCMV vector construction. Shown are examples for the use of the sMVA fragments F1-F3 to generate rsMVA vectors with inserted HCMV antigen sequences based on the five subunits of the pentamer complex (PC; including UL128, UL130, UL131A, gH, and gL), glycoprotein B (gB), phosphoprotein 65 (pp65), and/or the immediately-early proteins 1 and 2 (IE1 and IE2). The HCMV antigen sequences are inserted as indicated either separately or combined as 2A-linked polycistronic expression constructs into different MVA insertion sites, including the MVA Deletion 3 (Del3) site or intergenic regions between open reading frames 044/045 (44/45), 064/065 (64/65), or 069/070 (69/70). Examples are provided for rsMVA vectors expressing all PC subunits (sMVA-PC1 (FIG. 10A) and sMVA-PC2 (FIG. 10B)), all PC subunits together with gB and pp65 (sMVA-7Ag1 (FIG. 10C) and sMVA-7Ag2 (FIG. 10D)), or all PC subunits, gB, and pp65 together with IE1/IE2 antigens (sMVA-8Ag1/2 (FIGS. 10E-10F)) and sMVA-9Ag2 (FIGS. 10G-10H)). mH5 represents Vaccinia modified H5 promoter, and ITR represents inverted terminal repeats.

[0021] FIGS. 11A-11B show sMVA characterization. FIG. 11A: PCR analysis. CEF infected with sMVA, derived with FPV HP1.441 (sMVA hp) or TROVAC from two independent virus reconstitutions (sMVA tv1 and sMVA tv2), were investigated by PCR for several MVA genome positions (ITR sequences, transition left or right ITR into internal unique region (left ITR/UR; UR/right ITR), Del2, IGR69/70 and Del3 insertion sites, and F1/F2 and F2/F3 recombination sites) and absence of BAC vector sequences. PCR reactions with wtMVA-infected and uninfected cells, without sample (mock), or with MVA BAC were performed as controls. FIG. 11B: Restriction fragment length analysis. Viral DNA isolated from ultra-purified sMVA (sMVA tv1 and sMVA tv2) or wtMVA virus was compared by KpnI and XhoI restriction enzyme digestion.

[0022] FIGS. 12A-12D show sMVA replication properties. The replication properties of sMVA derived with FPV HP1.441 (sMVA hp) or TROVAC from two independent sMVA virus reconstitution (sMVA tv1 and sMVA tv2) were compared with wtMVA. FIG. 12A: Viral foci. CEF infected at low multiplicity of infection (MOI) with the reconstituted sMVA virus or wtMVA were immunostained using anti-Vaccinia polyclonal antibody (αVAC). FIG. 12B: Replication kinetics. BHK or CEF cells were infected at 0.02 MOI with sMVA or wtMVA and viral titers of the inoculum and infected cells at 24 and 48 hours post infection were determined on CEF. Mixed-effects model with the Geisser-Greenhouse correction was applied; at 24 and 48 hours post-infection differences between groups were not significant. FIG. 12C: Viral foci size analysis. BHK or CEF cell monolayers were infected at 0.002 MOI with sMVA or wtMVA and areas of viral foci were determined at 24 hours post infection following immunostaining with αVAC antibody. FIG. 12D: Host cell range analysis. Various human cell lines (HEK293, A549, 143b, and HeLa), CEF or BHK cells were infected at 0.01 MOI with sMVA or wtMVA and virus titers were determined at 48 hours post infection on CEF. Dotted lines indicate the calculated virus titer of the inoculum based on 0.01 MOI. Differences between groups in FIGS. 12C-12D were calculated using one-way ANOVA followed by Tukey's (2C) or Dunnett's (2D) multiple comparison tests. ns=not significant.

[0023] FIGS. 13A-13D demonstrate sMVA in vivo immunogenicity. sMVA derived either with FPV HP1.441 (sMVA hp) or TROVAC from two independent virus reconstitution (sMVA tv1 and sMVA tv2) was compared by in vitro analysis with wtMVA. C57BL/6 mice were immunized twice at three-week interval with low (1×10⁷ PFU) or high (5×10⁷ PFU) dose of sMVA or wtMVA. Mock-immunized mice were used as controls. FIG. 13A: Binding antibodies. MVA-specific binding antibodies (IgG titer) stimulated by sMVA or wtMVA were measured after the first and second immunization by ELISA. FIG. 13B: NAb responses. MVA-specific NAb titers induced by sMVA or wtMVA were measured after the booster immunization against recombinant wtMVA expressing a GFP marker. FIGS. 13C-13D: T cell responses. MVA-specific IFNγ, TNFα, IL-4, and IL-10-secreting CD8+ (13C) and CD4+ (13D) T cell responses induced by sMVA or wtMVA after two immunizations were measured by flow cytometry following ex vivo antigen stimulation using B8R immunodominant peptides. Differences between groups were evaluated using one-way ANOVA with Tukey's multiple comparison test. ns=not significant.

[0024] FIGS. 14A-14D demonstrate sMVA immunogenicity in vivo. sMVA derived either with FPV strain HP1.441 (sMVA hp) or with FPV strain TROVAC from two independent virus reconstitution (sMVA tv1 and sMVA tv2) was compared by in vitro analysis with wtMVA. C57BL/6 mice (N=4) were immunized twice in a three-week interval with low (1×10⁷ PFU) or high (5×10⁷ PFU) dose of sMVA or wtMVA. Mock-immunized mice were used as controls. FIG. 14A: Binding antibodies. Shown is the absorbance at 450 nm at different serum dilutions of MVA-specific binding antibodies (IgG titer) measured by ELISA after the first and second immunization in mice receiving sMVA or wtMVA. FIG. 14B: NAb responses. MVA-specific NAb titers induced by sMVA or wtMVA were measured after the booster immunization against wtMVA expressing a GFP marker. Shown is the measured GFP area of infected cells in square pixels (pix²×10³) at different serum dilutions. FIGS. 14C-14D: T cell responses. MVA-specific CD8+ (14C) and CD4+(14D) T cells expressing IFNγ, TNFα, IL-4, and IL-10 were measured after two immunizations with sMVA or wtMVA by flow cytometry following ex vivo antigen stimulation using Vaccinia A19L immunodominant peptides. Differences between groups were evaluated using one-way ANOVA with Tukey's multiple comparison test. ns=not significant.

### DETAILED DESCRIPTION

[0025] Disclosed herein are methods of producing poxvirus-based vectors and recombinant poxvirus vectors from circularized or linearized, naturally derived or chemically synthesized DNA. Specific examples are provided herein to produce a fully synthetic version of MVA (sMVA) from circularized synthetic DNA fragments as well as recombinant sMVA (rsMVA) expressing one or more heterologous gene sequences, including fluorescence markers or infectious disease and cancer antigens.

[0026] Because of its excellent safety profile in addition to its versatile expression system and large capacity to accommodate foreign DNA sequences (up 30 kbp)¹, MVA is widely used to develop recombinant vaccine vectors against infections disease and cancer^{7,12,13}. MVA has been pursued to develop different vaccine strategies for cancer treatment^{14,15} as well as various vaccine approaches to prevent human cytomegalovirus (HCMV) infection¹⁶⁻¹⁸, a common cause of permanent birth defects in newborns and complications in transplant recipients¹⁹. Some of these vaccines have completed clinical phase I or II evaluation^{14,17}. As a member of the poxvirus family, MVA replicates entirely in the cytoplasm of infected cells, providing its own enzymes for transcription and DNA replication^{1,20}. Although MVA virus production is abortive because of a late block in assembly in mammalian cells, MVA can efficiently infect most mammalian cells, including human cells, and initiate robust gene expression and DNA replication, making MVA an ideal vehicle to efficiently deliver and express foreign antigens in vitro and in vivo^{1,5}. The most commonly used method to generate MVA recombinants is based on the so-called transfection/infection method using a transfer plasmid, which is co-delivered together with MVA into permissive cells (CEF or BHK), thereby inserting a desired antigen together with an upstream promoter sequence and downstream transcription termination signal into the MVA genome by spontaneous homologous recombination^{1,5,21}.

[0027] Although this method is widely used, it can be laborious and is hampered by several rounds of selection during antigen insertion and additionally during subsequent marker removal to obtain homogenous populations of recombinant MVA²¹. These drawbacks in the conventional transfection/infection method can be particular problematic for the generation of multiantigenic MVA vectors with antigens inserted into two or more insertion sites, which can reduce MVA vaccine stability^{18,22}. As an alternative to the conventional transfection/infection method and to facilitate the generation of multiantigenic MVA vectors, methods have been developed to generate MVA recombinants using bacterial artificial chromosome (BAC) technology²³⁻²⁵. These methods allow repeated manipulation to insert antigens into the MVA genome by highly efficient and versatile mutagenesis techniques and to reconstitute homogenous virus populations of recombinant MVA in BHK cells with Fowl poxvirus (FPV) as a helper virus, which is required to “jump-start” the transcription of the non-infectious MVA genome²³.

### Construction of Synthetic Poxviruses

[0028] Disclosed herein are methods of producing poxvirus-based vectors or recombinant poxvirus vectors from naturally derived or chemically synthesized DNA. In certain embodiments, a single DNA fragment is derived from viral DNA or chemically synthesized and comprises the entire genome sequence of a poxvirus. This single DNA fragment can be used to transfect a host cell such that the poxvirus is reconstituted. In other embodiments, two or more naturally derived or chemically synthesized DNA fragments, or a combination thereof, are used to co-transfect a host cell, wherein each DNA fragment comprises a partial sequence of the poxvirus genomic DNA with overlapping sequences at the ends of two adjacent DNA fragments, such that when the two or more DNA fragments are co-transfected into the host cell, they assemble with each other by homologous recombination to form a poxvirus comprising a full-length sequence of the desired poxvirus genome. In certain embodiments, the overlapping sequence is between about 100 bp and about 5000 bp in length.

[0029] In certain embodiments, a shortened genomic sequence rather than the entire genomic sequence or an altered genomic sequence with deletion(s) or modification(s) in non-essential genes or regions of the genomic sequence of a poxvirus, or a hybrid derivative comprising the genomic sequences from two or multiple different poxviruses can be used to produce vectors disclosed herein.

[0030] In certain embodiments, one or more naturally derived or chemically synthesized DNA fragment(s) comprising the poxvirus genome or subgenomic DNA may be further modified to form artificial hybrid fragments composed of natural and synthetic poxvirus genomic DNA sequences. In other embodiments, the naturally derived or chemically synthesized one or more DNA fragment(s) maybe composed of sequences derived from two different poxviruses to form poxvirus hybrid sequences. One or more DNA fragment(s) can be composed of poxvirus sequences or sequences composed of different poxvirus sequences derived from MVA (NCBI accession #U94848, #AY603355), Vaccinia virus (#NC_006998, #LT966077), Camelpox virus (#NC_003391), Cowpox virus (#NC_003663) Ectromelia virus (#NC_004105), Monkeypox virus (#NC_003310), Racoonpox virus (#NC_027213), Skunkpox virus (#NC_031038), Taterapox virus (#NC_008291), Variola virus (#NC_001611, #L22579), Velopox virus (#NC_031033), Canarypox virus (#NC_005309), Swinepox virus (#NC_003389), FPV (#NC_002188, #MH734528), Myxoma virus (#GQ409969), Sheeppox virus (NC_004002), Goatpox virus (#NC_004003), (Orf virus #NC_005336), Rabbit fibroma virus (#NC_001266), any strain variations of these poxviruses, or any other poxvirus or strain variations thereof.

[0031] In certain embodiments, the host cell is infected with a helper virus such as FPV before, during, or after the transfection of one or more DNA fragments comprising the sequence of the poxvirus genome or subgenomic DNA. A helper virus can be any suitable virus that infects the host cell and allows initiation of the transcription and replication of the poxvirus. Used herein as an example is FPV in the host cell without undergoing homologous recombination with the poxvirus DNA. The helper virus is unable to replicate in the host cell. Furthermore, the helper virus itself is not a component of the reconstituted poxvirus, e.g., FPV for the purposes of this application. In certain embodiments, cowpox virus, Shope fibroma virus, or other suitable poxviruses can be used as a helper virus. In certain embodiments, one or more DNA fragments for transfection can be linearized, circularized, or a combination of linearized and circularized DNA fragments. In certain embodiments, one or more DNA fragments for transfection are cloned into a vector such as a plasmid or a BAC and/or maintained in a host cell such as a bacterial cell, e.g., E. coli.

[0032] In certain embodiments, one or more DNA fragment(s) further comprise one or both of the inverted terminal repeat (ITR) regions of the poxvirus. In certain embodiments, the sequence of the ITR may contain one or more alterations or variations, which do not affect the design scheme of the reconstituted poxvirus. In one embodiment, the one or more DNA fragments that reconstitute the poxvirus may contain only parts of the ITR sequences. For example, the sMVA fragments F1 and F3 as well as the reconstituted sMVA vectors or recombinant sMVA vectors (FIG. 1-4) may contain only parts of the MVA ITR sequences. In certain embodiments, one or more DNA fragment(s) are further modified to add a poxvirus terminal hairpin loop (HL) sequence at one end or both ends as a duplex copy (double stranded DNA) or the 5′ and/or 3′ ends as a single stranded nucleotide sequence. For example, the HL sequence can be added to either end or both ends of a synthetic DNA fragment as double-stranded or single-stranded DNA sequence in sense (5′→3′) or anti-sense (3′→5′) orientation. In certain embodiments, one or more DNA fragment(s) are further modified to add a poxvirus concatemeric resolution (CR) sequence at one end or both ends as double stranded DNA sequence or at the 5′ and/or 3′ ends as a single stranded nucleotide sequence. The CR sequence can be based on any sequence derived from the consensus sequence 5′-T₆-N₇₋₉-T/C-A₃-T/A-3′, wherein A is adenine, C is cytosine, G is guanine, T is thymine, and N is any nucleotide. In certain embodiments, two CR sequences can be added to both ends of the HL sequence to form a CR-HL-CR sequence. The CR-HL-CR sequence can be added to one or more DNA fragment(s) to one end or both ends as double stranded DNA sequences, or to the 5′ end, 3′ end, or both ends as single stranded nucleotide sequences. In other embodiments, only the HL or CR sequence is added to one end or both ends of one or more DNA fragment(s) as double or single stranded DNA sequence. In certain embodiments, all the DNA fragments contain the HL or CR sequence or a combination thereof at one or both ends. In other embodiments, not all the DNA fragments contain the HL or CR sequence. In certain embodiments, only a subset or a subpopulation of the DNA fragments contain the HL or CR sequence, or a combination thereof. The ITR, HL or CR sequences maybe derived from MVA (NCBI accession #U94848, #AY603355), Vaccinia virus (#NC_006998, #LT966077), Camelpox virus (#NC_003391), Cowpox virus (#NC_003663) Ectromelia virus (#NC_004105), Monkeypox virus (#NC_003310), Racoonpox virus (#NC_027213), Skunkpox virus (#NC_031038), Taterapox virus (#NC_008291), Variola virus (#NC_001611, #L22579), Velopox virus (#NC_031033), Canarypox virus (#NC_005309), Swinepox virus (#NC_003389), FPV (#NC_002188, #MH734528), Myxoma virus (#GQ409969), Sheeppox virus (NC_004002), Goatpox virus (#NC_004003), (Orf virus #NC_005336), Rabbit fibroma virus (#NC_001266), any strain variations of these poxviruses, or any other poxvirus or strain variation thereof.

[0033] In certain embodiments, the HL or CR sequences used herein are disclosed as follows:

[0034] Sequence of terminal CR-HL-CR sequences containing a duplex copy of the MVA terminal hairpin loop (HL) flanked by MVA concatemeric resolution sequences (215 bp in length, 5′→3′) (SEQ ID NO: 1), wherein the CR sequences are underlined and the HL sequence is italicized and double underlined:

tttttttctaaacactaaataaata

[symbol]

[symbol]

[symbol]

[symbol]

[symbol]

[symbol]

[symbol]

[symbol]

[symbol]

[symbol]

[symbol]

[symbol]

[symbol]

[symbol]

tatttatttagtgtctagaaaaaaa

[0035] Sequence of terminal CR-HL-CR sequences containing a duplex copy of the complementary form of the MVA terminal hairpin loop (HL) flanked by concatemeric resolution sequences (215 bp in length, 5′->3′) (SEQ ID NO: 2), wherein the CR sequences are underlined and the HL sequence is italicized and double underlined:

tttttttctagacactaaataaata

[symbol]

[symbol]

[symbol]

[symbol]

[symbol]

[symbol]

[symbol]

[symbol]

[symbol]

[symbol]

[symbol]

[symbol]

[symbol]

[symbol]

tatttatttagtgtctagaaaaaaa

[0036] Sequence of the MVA terminal hairpin loop (HL, 165 nt in length, 5′→3′) (SEQ ID NO: 3):

gtaagattaaattaattataaaattatgtatataatattaattataaaa
ttatgtatatgatttactaactttagttagataaattaataatacataa
attttagtatattaatattataaattaataatacataaattttagtata
ttaatattatattttaaa

[0037] Sequence of the complementary form of the MVA terminal hairpin loop (HL, 165 nt in length, 5′->3′) (SEQ ID NO: 4):

tttaaaatataatattaatatactaaaatttatgtattattaatttata
atattaatatactaaaatttatgtattattaatttatctaactaaagtt
agtaaatcatatacataattttataattaatattatatacataatttta
taattaatttaatcttac

[0038] Sequence of terminal CR-HL-CR sequences containing a duplex copy of the Vaccinia terminal hairpin loop (HL; S-Form) flanked by concatemeric resolution sequences (154 bp in length, 5′->3′) (SEQ ID NO: 5), wherein the CR sequences are underlined and the HL sequence is italicized and double underlined:

tttttttctagacactaaataaaa [symbol] [symbol] [symbol] [symbol] [symbol] [symbol] [symbol] [symbol] [symbol] [symbol]
attttatttagtgtctagaaaaaaa

[0039] Sequence of terminal CR-HL-CR sequences containing a duplex copy of the Vaccinia terminal hairpin loop (HL; F-Form) flanked by concatemeric resolution sequences (154 bp in length, 5′->3′) (SEQ ID NO: 6), wherein the CR sequences are underlined and the HL sequence is italicized and double underlined:

tttttttctagacactaaataaaat [symbol] [symbol] [symbol] [symbol] [symbol] [symbol] [symbol] [symbol]
attttatttagtgtctagaaaaaaa

[0040] Sequence 1 of the Vaccinia virus terminal hairpin loop (HL, S-form, 104 nt in length, 5′→3′) (SEQ ID NO: 7):

tagtaaaattaaattaattataaaattatatatataatttactaacttt
agttagataaattaataatatataagttttagtacattaatattatatt
ttaaat

[0041] Sequence 2 of the Vaccinia virus terminal hairpin loop (HL, F-form, 104 nt in length, 5′→3′) (SEQ ID NO: 8):

atttaaaatataatattaatgtactaaaacttatatattattaatttat
ctaactaaagttagtaaattatatatataattttataattaatttaatt
ttacta

[0042] Sequence 1 of the MVA concatemer resolution sequences (CR, 20 bp in length, 5′→3′) (SEQ ID NO: 9, sense orientation), included at the left end of the hairpin duplex copy in the working example:

tttttttctagacactaaat

[0043] Sequence 2 of the MVA concatemer resolution sequences (CR, 20 bp in length, 5′→3′) (SEQ ID NO: 10, antisense orientation), included at the right end of the hairpin duplex copy in the working example:

atttagtgtctagaaaaaaa

[0044] As demonstrated in the working examples, sMVA and rsMVA recombinants disclosed herein are generated based on chemical synthesis of three ˜60 kbp long DNA fragments that encompass the entire ˜178 kbp of the MVA genome published by Antoine and colleagues (Accession #U94848)²⁶. This includes the internal unique region (UR) and the flanking ˜9.6 kbp long inverted terminal repeat (ITR) regions as illustrated in FIG. 1. The MVA genome sequence published by Antoine et al. (Accession #U94848)²⁶, herein referred to as MVA strain Antoine, differs precisely in five base pairs in the internal UR from the MVA genome of the licensed and commercially available National Institute of Health clone 1 from 1974 (MVA NIH clone 1), which is identical in sequence to the published genome of MVA strain Acambis (Accession #AY603355). sMVA fragment 1 (F1) encompasses the left ITR and ˜50 kbp of the left end of internal UR of the MVA genome; sMVA fragment 2 (F2) contains ˜60 kbp of the middle part of the internal UR of the MVA genome; and sMVA fragment 3 (F3) encompasses ˜50 kbp of the right end of the internal UR and the right ITR of the MVA genome (FIG. 1). sMVA F1 and F2 as well as sMVA F2 and F3 are designed to share ˜3 kbp overlapping sequences to allow the reconstitution of the complete MVA genome by homologous recombination (FIG. 1). A duplex copy of the 165-nucleotide long MVA terminal HL flanked by MVA CR sequences is added to both ends of each of the three fragments to promote MVA genome resolution and packaging²⁶ (FIG. 1). In addition, SfiI and FseI restriction sites are included at both ends of each of the three fragments in a way that the fragments can be released or linearized with or without the HL and CR sequences. The sole exception is the HL and CR sequences at the ITR of F1 and F3 that are fused to the ends in identical arrangement as it occurs at the junctions of MVA concatemeric replication intermediates²⁶ (FIG. 1). The three sMVA fragments with flanking HL and CR sequences as well as overlapping homologous recombination sequences as depicted in FIG. 1 were synthesized and generated using a yeast-based recombination system by Genscript Biotech. All three sMVA fragments were cloned into a yeast shuttle vector, termed pCCI-Brick, which contains a bacterial mini-F replicon element that can be used as a BAC vector to stably propagate the three fragments at low copy number in bacteria (FIG. 1). The sMVA fragments were ultimately cloned into recombination defective DH10B or EPI300 E. coli cells.

[0045] In certain embodiments, a duplex copy of the HL with flanking CR sequences at both ends of each of the three MVA fragments is included—as opposed to only at the ends at the ITR of F1 and F3 where they occur naturally in concatemeric replication intermediates. This design is based on the intrinsic functions that these sequence elements have during poxvirus DNA replication. The terminal HL in packaged poxvirus genomes connects the two DNA strands at the genomic termini to a continuous polynucleotide chain, where they exist at both ends in inverted and complementary forms that are incompletely base-paired and AT-rich²⁶⁻²⁹. Poxvirus HL sequences are important for the replication of the double-stranded DNA genomes into multimeric head-to-tail or head-to-head concatemeric replication intermediates, in which the HL sequences are present at the concatemeric junctions as precise duplex copies³⁰⁻³². The CR elements are comprised of a highly conserved poxvirus resolution sequence and can be found in packaged genomes at both ends of the large ITRs directly adjacent to the terminal H L^{26,27,33,34}. Poxvirus CR elements in concatemeric replication intermediates are present on either site of the HL duplex copies at the genomic junctions, and these CR/HL/CR sequence arrangements are essential for the resolution of unit-length genomes and subsequent genome packaging³³⁻³⁶. When circular plasmids containing poxvirus concatemeric junctions, which are composed of an HL duplex copy flanked by CR elements, are transfected into poxvirus infected cells they are spontaneously resolved into linear minichromosomes with terminal HL^{36,37}. In certain embodiments, the circularized sMVA fragments, when transfected into the host cell, can immediately replicate in the host cell in an origin independent manner. It was reported that any circular DNA molecule transfected into poxvirus infected cells is replicated in an origin independent manner, and this non-specific sequence replication is not enhanced by insertion of any viral DNA fragments³⁸. In other embodiments, the circularized sMVA fragments, when transfected into the host cell, can be replicated by a eukaryotic or viral origin of replication inserted into the vector or MVA sequences.

[0046] The disclosed construction technique of the synthetic poxvirus such as sMVA includes the HL and CR sequences such that transfection of circular plasmids or DNA molecules containing the three synthetic MVA fragments with flanking concatemeric genomic junctions (CR-HL-CR) and overlapping genome sequences into FPV-infected BHK or CEF cells will promote (1) the transcription and replication of the three sMVA fragments, (2) the resolution of the three sMVA fragments from the plasmid vector sequences, and (3) the recombination of the three sMVA fragments into full-length genomes, ultimately leading to the packaging of vector-free genomes with terminal HL into preformed virus particles (FIGS. 1 and 2). These events may be initiated immediately as a consequence of the FPV infection or they may occur in a step-wise process following transcription initiation and replication of the three sMVA fragments. In another embodiment, the reconstitution process of the sMVA from the three sMVA fragments may be initiated without FPV or other helper virus. In an alternative to this strategy to reconstitute sMVA from the three MVA fragments using circular plasmids or DNA molecules, the reconstitution of sMVA may also be promoted by an approach based on linearized forms of the three sMVA fragments using for example the added FseI and SfiI restriction sites as shown in FIGS. 1 and 2.

[0047] Regardless of whether using circular or linearized forms of the three MVA fragments or a combination of circular and linearized forms, the ends of the fragments may or may not contain HL and CR sequences. In certain embodiments, only a subset of the fragments may contain the HL and CR sequences, or they may be added to only one end or two ends of the fragments as single or double stranded DNA sequences in sense or antisense orientation, for example in a way that they are only present at the MVA partial sequences of F1 and F3 where they occur naturally in putative concatemeric replication intermediates. In another example, not all F1 fragments contain the HL and CR sequences; rather, F1 fragments with or without the HL and CR sequences may be mixed in the construction process. Likewise, not all F2 or F3 fragments are required to contain the HL and CR sequences but a subset or a subpopulation of F2 or F3 fragments may contain the HL and CR sequences. In certain embodiments, HL and/or CR sequences may also be chemically ligated as single or double stranded DNA sequences in linearized forms of the three fragments.

[0048] In another embodiment, the sMVA virus reconstituted from the sMVA fragments may be modified by introducing insertions, deletions, or point mutations, or by insertion with one or more heterologous DNA sequences encoding one or more antigens, subunits or fragments thereof. These modifications or antigen sequences may be introduced into the sMVA DNA fragment by conventional transfection/infection methods using a transfer plasmid with homology flanks that mediate homologous recombination. In certain embodiments, the one or more nucleotide sequences encoding the one or more antigens, subunits or fragments thereof may be codon optimized for eukaryotic or vaccinia expression. For example, the antigens, subunits or fragments thereof may be optimized for stability in transcription or expression in the host cell. Various codon optimization techniques may be used, including but not limited to the alteration of four of the same nucleotides in a row (e.g. GGGG, CCCC, TTTT, AAAA) by introducing silent point mutations that do not lead to amino acid changes in the encoded protein, or the adaption of the codon usage to a specific host species.

[0049] In another embodiment, the sMVA virus reconstituted from the sMVA fragments in a host cell such as BHK or CEF cells may be used to generate an sMVA bacterial artificial chromosome (BAC) containing a full length sMVA genome. The BAC vector sequences may be inserted into the sMVA genome by a transfer construct containing the BAC sequences with flanking homology sequences that mediate homologous recombination. Circular replication intermediates with inserted BAC sequences may be isolated from host cells such as BHK or CEF cells and transferred by electroporation or chemical transformation into E. coli cells that allow stable propagation of large DNA constructs, such as DH10B or EPI300. In another embodiment, the sMVA BAC may be transferred into GS1783 E. coli cells and manipulated by Red-recombination techniques such as En passant mutagenesis.

[0050] In another embodiment, the sMVA fragments may be used to reconstitute a complete or full-length sMVA genome by in vitro ligation methods or by other in vitro DNA assembly methods such as Gibson or Golden Gate assembly.

### Expression of Antigens or Other Heterologous Gene Sequences

[0051] The technology disclosed herein has the flexibility of inserting various antigens, subunits or fragments thereof, or other heterologous DNA sequences into the one or more naturally derived or chemically synthesized DNA fragment(s) before transfection such that upon reconstitution, a synthetic poxvirus expressing the antigens, subunits or fragments thereof is obtained. These antigens, subunits or fragments thereof maybe derived from or based on viruses such as cytomegalovirus (CMV), Epstein-Barr virus (EBV), Kaposi-Sarcoma-associated herpesviruses (KSHV), other herpesviruses, Zika virus, Lassa virus, Hepatitis C virus (HCV), Hepatitis (HBV), Coronaviruses (such as 2019-nCoV, SARS, MERS), Influenza, or any other viral, bacterial, or other forms of infectious pathogen. The antigen sequences may also be derived from or based on cancer-associated proteins (e.g., p53, Retinoblastioma, neoantigens). Likewise, other heterologous gene sequences may be inserted into the naturally derived or chemically synthesized poxvirus DNA fragment(s). Such heterologous gene sequences include but are not limited to fluorescence markers, cDNA copies of RNAs such as RNAi, shRNA, LNCRNA, miRNA, etc., interferons, cytokines, antibodies or fragments thereof, or other proteins expressed in prokaryotic or eukaryotic cells. In certain embodiments, the antigen sequences or heterologous gene sequences maybe inserted into the sMVA fragments with an upstream natural or synthetic poxvirus promoter (pSyn, P11, H5, mH5, P28, ATI, pHyb, p7.5) and a downstream transcription termination signal (TTTTTAT), such that the antigen sequences or heterologous gene sequences are expressed when the poxvirus fragments are transfected into a host cell.

[0052] The DNA sequences of the antigens, subunits or fragments thereof, or other heterologous gene sequences, can be inserted into one or more poxvirus insertion sites within the one or more DNA fragment(s). Using sMVA as an example, the DNA sequence of one antigen or fragment thereof can be inserted in a single MVA insertion site located on one sMVA DNA fragment, e.g., sMVA F2, before transfection of the host cell (FIG. 3). In another example, the DNA sequences of two or more antigens or fragments thereof can be inserted into a single MVA insertion site located on one DNA fragment, e.g., sMVA F2, before transfection of the host cell. These antigen DNA sequences may be under the control of a single promoter or two or more promoters. Likewise, the antigen DNA sequences may share the same transcription termination signal or have different transcription termination signals. The nucleotide sequences encoding two or more antigens may also be linked by 2A sequences of picornaviruses (P2A, T2A, F2A, etc.) mediating ribosomal skipping or by internal ribosomal entry sites (IRES) such that the antigens are processed following translation and self-assembled to form a multi-component antigen complex.

[0053] In certain embodiments, one or more DNA sequences encoding one or more antigens, subunits or fragments thereof, or other heterologous DNA sequences are inserted in frame at the 5′ end, 3′ end, or any internal position of one or more essential or non-essential poxvirus open reading frames (ORFs) such that when the one or more naturally-derived or chemically synthesized poxvirus DNA fragments are transfected into the host cell, one or more fusion proteins composed of a poxvirus protein with one more antigens, subunits or fragments thereof, or other heterologous protein sequences added to the C-terminus, N-terminus, or any internal position of the poxvirus proteins are expressed. In some embodiments, the one or more DNA sequences encoding one or more antigens, subunits or fragments thereof, or other heterologous DNA sequences are linked to the one or more poxvirus ORFs by 2A encoding sequences of picornaviruses (P2A, F2A, T2A etc,) such that the expressed one or more fusion proteins composed of a poxvirus protein with one more antigens, subunits or fragments thereof, or other heterologous protein sequences added to the C-terminus, N-terminus, or any internal position of the poxvirus proteins are processed (“cleaved”) into the individual components at the 2A linker sequences by a ribosomal skipping mechanism. In other embodiments, the one or more DNA sequences encoding one or more antigens, subunits or fragments thereof, or other heterologous DNA sequences are linked to one or more essential or non-essential poxvirus ORFs by internal ribosomal entry site sequences such that when the one or more naturally-derived or chemically synthesized poxvirus DNA fragments are transfected into the host cell, one or more poxvirus proteins and one more antigens, subunits or fragments thereof, or other heterologous protein sequences are simultaneously expressed through chimeric polycistronic expression constructs with multiple translation initiation sites at the 5′ end of each of the ORFs within the expression constructs.

[0054] In certain embodiments, the DNA sequences of two or more antigens, subunits or fragments thereof or other heterologous gene sequences may be inserted into two or more MVA insertion sites, which may be located on the same sMVA fragment or on different sMVA fragments. For example, the DNA sequences of two or more antigens, subunits or fragments thereof can be inserted in two different MVA insertion sites, both located on sMVA F1. In another example, the DNA sequences of two or more antigens, subunits or fragments thereof can be inserted into two different MVA insertion sites, one located on sMVA F1 and the other located on sMVA F2 (FIG. 4). It is understood that different DNA fragments may be inserted with the DNA sequence of the same antigen, subunits or fragments thereof. Alternatively, different sMVA fragments may be inserted with the DNA sequences of different antigens, subunits or fragments thereof such that upon reconstitution after transfection, the different antigens, subunits or fragments thereof expressed by the synthetic MVA are self-processed and self-assembled into a viral particle, a viral complex, or a complete antigen comprising the subunits or fragments thereof.

[0055] As demonstrated in the working examples, previously established methods of generating recombinant MVA vectors using BAC technology^{16,18,24,25} were adapted to generate rsMVA recombinants using the three sMVA fragments. Because the three sMVA fragments have been cloned into a BAC vector with mini-F replicon they can be stably propagated in bacteria and, consequently, they can be manipulated by highly efficient recombination methods such as En Passant mutagenesis or other E. coli-based manipulation procedures^{39,40}. Using these methods, naturally derived or synthetic heterologous antigen sequences together with an upstream vaccinia virus promoter and downstream transcription termination signal can be inserted into only one, two, or all three of the sMVA fragments in a parallel, successive, or repeated manner into virtually every MVA genome position (FIGS. 3 and 4). These insertion sites may include commonly used insertion sites such as the MVA deletion 2 (Del2) site, the intergenic region (IGR) between open reading frame (ORF) 44L and 45L (IGR44/45), the IGR between ORF 69R and 70L (IGR69/70), the IGR between 64L and 65L (IGR64/65), the Thymidine Kinase (TK) gene insertion site, or the MVA Deletion 3 (Del3) site (FIG. 1), or any other MVA deletion site, intergenic region, or gene insertion site (ORF numbers are based on MVA strain Antoine (Accession #U94848)). These methods may also be used to generate one or multiple point mutations, insertions, or deletions at one or multiple positions of one or more of the sMVA fragments. The modified sMVA fragments can be then isolated from E. coli and co-transferred as circular or linearized DNA molecules by various transfection methods into BHK or CEF cells infected with a helper virus to initiate the reconstitution of rsMVA with single, double, or multiple antigen insertions or genome alterations (FIGS. 3 and 4). In certain embodiments, the rsMVA reconstitution can be initiated without the addition of a helper virus. In certain embodiments, the three sMVA fragments may also be used to generate sMVA with single or multiple antigen insertion or genome alterations by in vitro ligation methods. In certain embodiments, one or more antigens, subunits or fragments thereof can be inserted into one or more MVA insertion sites of the sMVA fragments. In certain embodiments, only one sMVA fragment is inserted with one or more antigens or fragments thereof (FIG. 3). In certain embodiments, two or more sMVA fragments are inserted with one or more antigens or fragments thereof (FIG. 4). In certain embodiments, all sMVA fragments are inserted with one or more antigens, subunits or fragments thereof (FIG. 4). When two or more sMVA fragments are inserted with antigens, subunits or fragments thereof, the antigens, subunits or fragments thereof may be the same or different for different sMVA fragments. For example, sMVA F1 may be inserted with one type of antigen or fragment thereof, and sMVA F2 may be inserted with a different type of antigen or fragment thereof. Alternatively, sMVA F1 and F2 may be inserted with the same type of antigen or fragment thereof and sMVA F3 may be inserted with the same type of antigen or fragment thereof or with a different type of antigen, subunit or fragment thereof.

[0056] The poxvirus vectors produced by the technology disclosed herein may be used, for example, to generate multi-antigenic vaccine vectors to stimulate polyfunctional humoral and cellular immune response against various conditions such as viral infections and cancer. As an example, the disclosed technology based on the three sMVA fragments F1-F3 may be used to generate multi-antigenic rsMVA vaccine vectors to stimulate polyfunctional humoral and cellular immune response against human cytomegalovirus (HCMV). This may include immunodominant antigen sequences based on the five subunits of the HCMV pentamer complex (PC), glycoprotein B (gB), phosphoprotein 65 (pp65), and the immediate-early 1 and 2 proteins (IE1 and IE2). The antigen sequences may be inserted separately or combined as 2A-linked polycistronic expression constructs into the sMVA fragments at different commonly used MVA insertion sites (Del2, Del3, IGR44/45, IGR69/70, IGR64/65) to generate rsMVA vaccine vectors expressing 5, 6, 7, 8, or 9 HCMV antigens, as illustrated in FIG. 6 and FIG. 10. rsMVA vectors expressing only single HCMV antigens or any other number or combination of the above-mentioned nine HCMV antigens may also be generated. All antigen sequences or expression constructs may be inserted together with an upstream mH5 promoter and downstream transcription termination signal. These vectors may be used to stimulate immune responses against HCMV in animal models or humans.

### Expression Systems and Vaccines

[0057] According to the embodiments described herein, an MVA expression system is provided herein. In certain embodiments, the expression system may express one or more desired antigens, subunits or fragments thereof or other heterologous protein sequences.

[0058] As described above, one or more sMVA fragments may be inserted with the DNA sequences encoding one or more antigens, subunits or fragments thereof such that the reconstituted sMVA simultaneously expresses the antigens, subunits and fragments thereof.

[0059] In certain embodiments, the antigen DNA sequences inserted into the sMVA fragments may be based on the natural DNA sequence or from chemical synthesis. In other embodiments, the antigen DNA sequences may be optimized for expression and stability within the expression system.

[0060] The sMVA described herein may be part of a vaccine composition that may be used in methods to treat or prevent viral infection or to treat cancer, depending on the antigens expressed by the sMVA. The vaccine composition as described herein may comprise a therapeutically effective amount of the sMVA as described herein, and further comprising a pharmaceutically acceptable carrier according to a standard method. Examples of acceptable carriers include physiologically acceptable solutions, such as sterile saline and sterile buffered saline.

[0061] In some embodiments, the vaccine or pharmaceutical composition may be used in combination with a pharmaceutically effective amount of an adjuvant to enhance the prophylactic or therapeutic effects. Any immunologic adjuvant that may stimulate the immune system and increase the response to a vaccine, without having any specific antigenic effect itself may be used as the adjuvant. Many immunologic adjuvants mimic evolutionarily conserved molecules known as pathogen-associated molecular patterns (PAMPs) and are recognized by a set of immune receptors known as Toll-like Receptors (TLRs). Examples of adjuvants that may be used in accordance with the embodiments described herein include Freund's complete adjuvant, Freund's incomplete adjuvant, double stranded RNA (a TLR3 ligand), LPS, LPS analogs such as monophosphoryl lipid A (MPL) (a TLR4 ligand), flagellin (a TLR5 ligand), lipoproteins, lipopeptides, single stranded RNA, single stranded DNA, imidazoquinolin analogs (TLR7 and TLR8 ligands), CpG DNA (a TLR9 ligand), Ribi's adjuvant (monophosphoryl-lipid A/trehalose dicorynoycolate), glycolipids (α-GalCer analogs), unmethylated CpG islands, oil emulsion, liposomes, virosomes, saponins (active fractions of saponin such as QS21), muramyl dipeptide, alum, aluminum hydroxide, squalene, BCG, cytokines such as GM-CSF and IL-12, chemokines such as MIP 1-α and RANTES, activating cell surface ligands such as CD40L, N-acetylmuramine-L-alanyl-D-isoglutamine (MDP), and thymosin α1. The amount of adjuvant used can be suitably selected according to the degree of symptoms, such as softening of the skin, pain, erythema, fever, headache, and muscular pain, which might be expressed as part of the immune response in humans or animals after the administration of this type of vaccine.

[0062] In further embodiments, use of various other adjuvants, drugs or additives with the vaccine of the invention, as discussed above, may enhance the therapeutic effect achieved by the administration of the vaccine or pharmaceutical composition. The pharmaceutically acceptable carrier may contain a trace amount of additives, such as substances that enhance the isotonicity and chemical stability. Such additives should be non-toxic to a human or other mammalian subject in the dosage and concentration used, and examples thereof include buffers such as phosphoric acid, citric acid, succinic acid, acetic acid, and other organic acids, and salts thereof; antioxidants such as ascorbic acid; low molecular weight (e.g., less than about 10 residues) polypeptides (e.g., polyarginine and tripeptide) proteins (e.g., serum albumin, gelatin, and immunoglobulin); amino acids (e.g., glycine, glutamic acid, aspartic acid, and arginine); monosaccharides, disaccharides, and other carbohydrates (e.g., cellulose and derivatives thereof, glucose, mannose, and dextrin), chelating agents (e.g., EDTA); sugar alcohols (e.g., mannitol and sorbitol); counterions (e.g., sodium); nonionic surfactants (e.g., polysorbate and poloxamer); antibiotics; and PEG.

[0063] The vaccine or pharmaceutical composition containing the sMVA described herein may be stored as an aqueous solution or a lyophilized product in a unit or multiple dose container such as a sealed ampoule or a vial.

### Preventing or Treating Viral Infections or Cancer

[0064] The poxvirus reconstituted from the one or more naturally derived or chemically synthesized DNA fragment(s), with or without the inserted antigens, subunits or fragments thereof, or other heterologous sequences may be used as a vaccine composition for preventing or treating various viral infections or cancer. One of ordinary skill in the art would know how to select a particular viral or cancer antigen for the conditions or diseases to be prevented or treated. This may include but is not limited to any infectious disease or cancer antigen that is capable of eliciting an immune response, such as viral envelope glycoproteins or glycoprotein complexes, immunodominant T cell antigens, or mutated cancer neoantigens. These antigen sequences or portions thereof maybe derived from or based on viruses such as CMV, EBV, KSHV, other herpesviruses, Zika virus, Lassa virus, HCV, HBV, Coronaviruses, Influenza, or any other viral, bacterial, or other forms of infectious pathogen.

[0065] The following examples are intended to illustrate various embodiments of the invention. As such, the specific embodiments discussed are not to be constructed as limitations on the scope of the invention. It will be apparent to one skilled in the art that various equivalents, changes, and modifications may be made without departing from the scope of invention, and it is understood that such equivalent embodiments are to be included herein. Further, all references cited in the disclosure are hereby incorporated by reference in their entirety, as if fully set forth herein.

### EXAMPLES

### Example 1: Reconstitution of sMVA Using Circular Forms of the Synthetic MVA Fragments

[0066] As an initial test to validate the sMVA platform, a procedure as illustrated in FIG. 2 was used to evaluate the reconstitution of sMVA from circular forms of the three sMVA fragments. The three sMVA fragments (F1 to F3) were isolated by alkaline lysis⁴¹ from EPI300 or DH10B E. coli, which allows stable propagation of large DNA fragments cloned as a BAC, and co-transfected (˜1-2 μg/fragment) as circular plasmids by lipofection into monolayers of BHK cells (6 well plate format) (FIG. 5). At 4 hours post infection (hpi), the BHK cells were infected with a helper FPV at 0.1 multiplicity of infection (MOI) to initiate MVA transcription and DNA replication. FPV-infected BHK cells transfected with only one or a combination of only two of the MVA fragments, mock-infected (uninfected) BHK cells transfected with all three MVA fragments, and mock-transfected BHK cells infected with FPV were used as controls. Transfected/infected BHK cells were grown under appropriate conditions and every 2 days dispersed (passaged) in ˜1:2 to 1:3 ratios into larger tissue culture formats using a procedure as illustrated in FIG. 5. Cytopathic effects (CPE) and signs of viral plaque formation and progression demonstrating reconstitution of sMVA were detected in FPV-infected BHK cell monolayers transfected with all three synthetic MVA fragments at 3-6 days post transfection/infection (dpt/i). At 7 to 8 dpt/i following dispersion of the FPV-infected BHK cells transfected with all three MVA fragments, the derived BHK cell monolayers showed 90-100% infection. In contrast, CPE or signs of characteristic MVA viral plaque formation were not observed in any of the controls. sMVA was prepared from BHK cell monolayers with 100% CPE by conventional freeze/thaw method, titrated on BHK cells, and used to infect BHK cell monolayers at low MOI to evaluate MVA infection and spreading at 16-72 hpi by immunostaining for the vaccinia virus glycoprotein B5R^{16,42}.

[0067] This analysis indicated that the reconstituted sMVA had similar capacity compared to MVA NIH clone 1 to form characteristic MVA viral foci and to spread in BHK cell monolayers (FIG. 6), confirming the formation of sMVA from the three sMVA fragments. Characteristic viral foci were detected in sMVA and MVA NIH-infected BHK cell monolayers at 1 day post infection (dpi), while at 2 dpi MVA viral infection was visible in the entire BHK cell monolayers infected with sMVA or MVA NIH, and at 3 dpi most cells of the BHK cell monolayers infected with sMVA or MVA NIH were detached. In contrast, no characteristic MVA viral infection or CPE was detected in mock-infected controls. Other research groups conclusively demonstrated that FPV, used as a helper virus, contributes no genetic material or recombines with the MVA genome when introduced into the transfection/infection incubation on BHK or CEF cells^{43,44}.

[0068] To characterize the genome of the reconstituted sMVA, viral DNA prepared from sMVA-infected BHK cells was evaluated by PCR using primers specific for different genome positions within the three synthetic MVA fragments. DNA prepared from mock-infected (uninfected) BHK cells as well as BHK cells infected with the NIH MVA clone 1 were used as controls. This PCR analysis revealed the presence of DNA derived from all three sMVA fragments within the genomic DNA of the reconstituted sMVA (FIG. 7). All PCR products derived from sMVA-infected BHK cells were similar (in molecular weight) compared to those derived from MVA NIH-infected BHK cells. This included (1) PCR products derived from the ITR sequences located within sMVA F1 and F3 (FIG. 7A); (2) PCR products corresponding to sMVA F1-derived DNA such as the transition of the left ITR into the left end of the internal UR (FIG. 7B), and the Del2 insertion site (FIG. 7C), (3) PCR products corresponding to sMVA F2-derived DNA such as the G1L/I8R insertion site (IGR69/70) (FIG. 7D); and PCR products corresponding to sMVA F3-derived DNA such as the Del3 insertion site (FIG. 7E), the transition of the right end of the internal UR into the right ITR (FIG. 7F). In addition, PCR analysis using primers with binding sites flanking the sMVA F1/F2 or sMVA F2/F3 overlapping homologous sequences (FIG. 1) showed similar product sizes for MVA and MVA NIH-infected BHK cells (FIGS. 7G-7H), indicating successful recombination of the three sMVA fragments and removal of the vector sequences in sMVA.

[0069] Sanger sequencing analysis of all PCR products derived from sMVA-infected BHK cells revealed sequences at these genome positions that were identical to the published sequence of MVA strain Antoine²⁶, including the recombination sites of F1/F2 and F2/F3. The only exception to this was the PCR product derived from the Del2 site of sMVA showing a single T to A nucleotide alteration located in the IGR at three base pairs downstream of open reading frame (ORF) 021L²⁶. BLAST analysis showed that this sequence alteration within sMVA DNA is not present in any published MVA or vaccinia virus genome sequence. Sanger sequences analysis of sMVA F1 purified from E. coli indicated that this specific nucleotide alteration at the Del2 site was already present before the sMVA reconstitution in BHK cells, suggesting that it has its origin in the chemical synthesis of F1 or is a result of the cloning or propagation of sMVA F1 in E. coli. Additional sequencing analysis of PCR products (FIGS. 7I-7L) derived from sMVA-infected BHK cells indicated that the sMVA genome sequence contained all five Antoine specific nucleotide polymorphisms in the internal UR that distinguishes it from the genome sequence of the MVA NIH clone 1.

[0070] The following DNA sequences are given as the nucleotide sequences (5′ to 3′) of the sense strands of the DNA molecules. Sequence of sMVA fragment 1 (F1, 60021 bp in length) (SEQ ID NO: 11):

ggcctagcaggccggcctttttttctagacactaaataaatagtaagattaaattaattataaaattatgtatataatattaa
ttataaaattatgtatatgatttactaactttagttagataaattaataatacataaattttagtatattaatattataaattaata
atacataaattttagtatattaatattatattttaaatatttatttagtgtctagaaaaaaatgtgtgaccaacgaccgtagga
aactctagagggtaagaaaaatcaatcgctttatagagaccatcagaaagaggtttaatatttttgtgagaccatcgaa
ggagaaagagataaaacttttttacgactccatcagaaagaggtttaatatttttgtgagaccatcgaagagagaaag
agataaaacttttttacgactccatcagaaagaggtttaatatttttgtgagaccatcgaagagagaaagagataaaac
ttttttacgactccatcagaaagaggtttaatatttttgtgagaccatcgaaggagaaagagataaaacttttttacgactc
catcagaaagaggtttaatatttttgtgagaccatcgaaggagaaagagataaaacttttttacgactccatcagaaag
aggtttaatatttttgtgagaccatcgaaggagaaagagataaaacttttttacgactccatcagaaagaggtttaatattt
ttgtgagaccatcgaagagagaaagagataaaacttttttacgactccatcagaaagaggtttaatatttttgtgagacc
atcgaaggagaaagagataaaacttttttacgactccatcagaaagaggtttaatatttttgtgagaccatcgaagaga
gaaagagaataaaaatattttagtgacaccatcagaaagaggtttaatatttttgtgagaccatcgaagagagaaag
agataaaacttttttacgactccatcagaaagaggtttaatatttttgtgagaccatcgaaggagaaagagataaaactt
ttttacgactccatcagaaagaggtttaatatttttgtgagaccatcgaagagagaaagagataaaacttttttacgactc
catcagaaagaggtttaatatttttgtgagaccatcgaagagagaaagagataaaacttttttacgactccatcagaaa
gaccatcgaagagagaaagagaaagagatagttagtctagatatttttcttagtacaaaagtcaatgttttaaaatatat
ggacaagaatttgtctgtataaaaacttgtgtgaaattttgtaccaaagaaaaaatgtgagcagtatcccctacatggat
tttactagatcatttatataccaaaaaatattatacgatctacgttttattatatgattttaacgtgtaaattataaacattatttta
tgatatacaattgtctggtaacctagatgggcataggggatgagtatatgttgttggacgttattgtttaagaaatagttgat
gcatcagaaagaggtttaatatttttgtgagaccatcgaagagagaaagagataaaacttttttacgactccatcagaa
agaggtttaatatttttgtgagaccatcgaagagagaaagagataaaacttttttatgactccattgaagagagaatga
gaataaaaatattttagtgacaccatcagaaagaggtttaatattttttatgagaccatcaaagagagaaagagaata
aaaatattttatgactccattgaagagagaaagagaaaatgagaataaaaatattttagtgacaccatcagaaagag
gtttaatattttttatgagaccatcaaagagagaaagagaataaaaatatttttgtaaaactttttttatgagaccatcaaa
gagagaaagagaataaaaatatttttgtaaaactttttttatgagaccatcaaagagagaaagagaataaaaatattttt
gtaaaactttttttatgagaccatcaaagagagaaagagaataaaaatatttttgtaaaactttttttatgagaccatcaa
agagagaaagagaataaaaatatttttgtaaaactttttttatgagaccatcaaagagagaaagagaataaaaatattt
ttgtaaaactttttttatgagaccatcaaagagagaaagagaataaaaatatttttgtaaaactttttttatgagaccatca
aagagagaaagagaataaaaatattttatgactccattgaagagagaaagagaataaaaatattttagtgacaccat
cagaaagaggtttaatatttttgtgagaccatcgaagagagaaagagaataaaaatattttatgactccattgaagag
agaaagagaataaaaatattttagtgacaccatcagaaagaggtttaatattttttatgagaccatcaaagagagaaa
gagaataaaaatatttttgtaaaactttttttatgagaccatcaaagagagaaagagaataaaaatatttttgtaaaacttt
ttttatgagaccatcaaagagagaaagagaataaaaatatttttgtaaaactttttttatgagaccatcaaagagagaa
agagaataaaaatatttttgtaaaactttttttatgagaccatcaaagagagaaagagaataaaaatatttttgtaaaact
ttttttatgagaccatcaaagagagaaagagaataaaaatattttatgactccattgaagagagaatgagaataaaaa
tattttagtgacaccatcagaaagaggtttaatatttttgtgagaccatcgaagagagaaagagaataaaaatattttat
gactccattgaagagagaaagagaataaaaatattttagtgacaccatcagaaagaggtttaatattttttatgagacc
atcaaagagagaaagagaataaaaatatttttgtaaaactttttttatgagaccatcaaagagagaaagagaataaa
aatatttttgtaaaactttttttatgagaccatcaaagagagaaagagaataaaaatatttttgtaaaactttttttatgagac
catcaaagagagaaagagaataaaaatatttttgtaaaactttttttatgagaccatcaaagagagaaagagaataa
aaatatttttgtaaaactttttttatgagaccatcaaagagagaaagagaataaaaatatttttgtaaaactttttttatgaga
ccatcaaagagagaaagagaataaaaatatttttgtaaaactttttttatgagaccatcaaagagagaaagagaata
aaaatattttatgactccattgaagagagaatgagaataaaaatattttagtgacaccatcagaaagaggtttaatatttt
tgtgagaccatcgaagagagaaagagaataaaaatattttatgactccattgaagagagaatgagaataaaaatatt
ttagtgacaccatcagaaagaggtttaatattttttatgagaccatcaaagagagaaagagaataaaaatatttttgtaa
aactttttttatgagaccatcaaagagagaaagagaataaaaatatttttgtaaaaattataaacattattttatgatatac
aattgtctggtaacctagatgggcataggggatgttgataagctcgacgagtatatgttgttggacgttattgtttaagaa
atagttgatgcatcagaaagagaataaaaaatattttagtgagaccatcgaagagagaaagagataaaacttttttac
gactccatcagaaagaggtttaatatttttgtgagaccatcgaagagagaaagagataaaacttttttacgactccatc
agaaagaggtttaatatttttgtgagaccatcgaaggagaaagagataaaacttttttacgactccatcagaaagaggt
ttaatatttttgtgagaccatcaaagagagaaagagaataaaaatatttttgtaaaactttttttatgagaccatcaaaga
gagaaagagaataaaaatatttttgtaaaactttttttatgagaccatcaaagagagaaagagaataaaaatatttttgt
aaaactttttttatgagaccatcaaagagagaaagagaataaaaatatttttgtaaaactttttttatgagaccatcaaag
agagaaagagaataaaaatattttatgactccattgaagagagaatgagaataaaaatattttagtgacaccatcag
aaagaggtttaatatttttgtgagaccatcgaagagagaaagagaataaaaatattttatgactccattgaagagaga
atgagaataaaaatattttagtgacaccatcagaaagaggtttaatattttttatgagaccatcaaagagagaaagag
aataaaaatatttttgtaaaactttttttatgagaccatcaaagagagaaagagaataaaaatatttttgtaaaacttttttta
tgagaccatcaaagagagaaagagaataaaaatatttttgtaaaactttttttatgagaccatcaaagagagaaaga
gaataaaaatatttttgtaaaactttttttatgagaccatcaaagagagaaagagaataaaaatattttatgactccattg
aagagagaatgagaataaaaatattttagtgacaccatcagaaagaggtttaatatttttgtgagaccatcgaagaga
gaaagagaataaaaatattttatgactccattgaagagagaaagagaataaaaatattttagtgacaccatcagaaa
gaggtttaatattttttatgagaccatcaaagagagaaagagaataaaaatatttttgtaaaactttttttatgagaccatc
aaagagagaaagagaataaaaatattttatgactccattgaagagagaatgagaataaaaatattttagtgacacca
tcagaaagaggtttaatatttttgtgagaccatcgaagagagaaagagaataaaaatattttatgactccattgaagag
agaatgagaataaaaatattttagtgacaccatcagaaagaggtttaatatttttgtgagaccatcgaagagagaaag
agaataaaaatattttatgactccattgaagagagaatgagaataaaaatattttagtgacaccatcagaaagaggttt
aatattttttatgagaccatcaaagagagaaagagaataaaaatatttttgtaaaactttttttatgagaccatcaaagag
agaaagagaataaaaatatttttgtaaaactttttttatgagaccatcaaagagagaaagagaataaaaatatttttgta
aaactttttttatgagaccatcaaagagagaaagagaataaaaatatttttgtgagaccatcaaagagagaaagaga
ataaaaatatttttgtgagaccatcaaagagagaaagagaataaaaatatttttgtgagaccatcaaagagagaaag
agaataaaaatattttatgactccattgaagagagaaagagaataaaaatattttagtgacaccatcagaaagaggtt
taatatttttgtgagaccatcgaagagagaaagagaataaaaatattttatgactccattgaagagagaaagagaata
aaaatattttagtgacaccatcagaaagaggtttaatattttttatgagaccatcaaagagagaaagagaataaaaat
attttttatgagaccatcaaagagagaaagagaataaaaatattttatgagaccatcaaagagagaaagagaataa
aaatattttttatgagaccatcaaagagagaaagagaataaaaatattttatgagaccatcaaagagagaaagaga
ataaaaatattttttatgagaccatcaaagagagaaagagaataaaaatatttttgtatgagaccatcagaaagaggtt
taatatttttgtgataccctgaaaggaaataggaatagtgtcataatcgtatcacactattgagacagaaaaagaagaa
gtcgcgagaggtaactttttgttttgcaaaccggaatatagtgtccggtacacttttttaattcgtggtgtgcctgaatcgttc
gattaaccctactcatccaatttcagatgaatagagttatcgattcagacacacgctttgagttttgttgaatcgatgagtg
aagtatcatcggttgcaccttcagatgccgatccgtcgacatacttgacctcaagttcagatgattccttgcacatgtctcc
gatacgaacgctaaactctagattcttgacacattttgtatcgacgatcgttgaaccgatgatatcttcgtaactcactttctt
atgagagatgttagacccgagtactggatgggtcttgatgtcgctgtctttctcttcttcgctacatctgatgtcgatagaca
cctcacagtctttccatcagcggattctgagatggatttaatctgaggacatttggtgaatccaaagttcattctcagacct
ccaccgatgatggagtaataagtggtaggaggatctacatcctcgactgattccacctcgggatctggatctgactcgg
actctgtaatttccgttacggattggcaaatcttatcatcggtcggtgtttggtcttgctttgtgactttgataataacatcgatt
cccatatgatgtttgttttcttcttccgtacacgatgaggatgattgctgaagactggcaggcacatgcatgccagtacga
tatattgtttcatgattgctattgattgagtactgttctttatgattctacttccttaccgtgcaataaattagaatatattttctactt
ttacgagaaattaattattgtatttatgggtgaaaaacttactataaaaagcgggtgggtttggaattagtgatcagtttatg
tatatcgcaactaccgggcatatggctacattacccacatgataagagattgtatcagtttcgtagtcttgagtattggtatt
actatatagtatatagatgtcgacgctagagttactgtctccgaatgcggcatgatagtatcattctttgctttcgttaactgtt
tggaggaagaatctttgttattgcatttaatctcgaaattcagagtgcacacctttctcctgtaaagaaacctgaagtcgct
accttattaagaagacgggatcgcagtctttatgattcatagtaatagttagttccgacgttgagatggattcgctgagac
cggtagtggtcgtccgagtacacgatgtgtcgttaactggatacaggttaatttccacatcgatatagttaaaggtatttct
gggtacgggttcgcatttatctgcggaagagacggtgtgagaatatgttccgagaccacacggagaacagatgacgt
ctccggatactccgtatcctattccacattttgtttgggaaacacatgccttgcatccatgatcgggagagcattcacaga
ttctattgtgagtcgtgttacacgatcgcgtcgacattgttgacagaaacgtgaccttcattcttaccgtcgtccataaatac
gttaggtatgtaccacatactgtcgcgaacgatgcgtccatctcataatgatttactttttcataattaaagatgtgaaaga
aaaccgaacaatatatttttttagtaatgtttatgcgagacatataaaataaactccgtgtttatgatgccggtaaatgttttt
atcatcttggacggaatcgattttgtaatatgccatggaaacaggacattatcactccatgataaattatttaatggagtc
gatcctctcattgttctttgcgtatctcaatctgtggcgtttgcttcgtttaaataatatatcaaacatggagacgcctgatatg
taggcattcttcattctattaatgtctgctctatagcgctttagttccttatgacgaccggcgatatcatacttactttagaagg
aaaatcatcatctaggattaaggcgtatctgatacaggcgaataatggttcaggatatagatagcgtatatctctattaa
atgcgtcaatcatagtctctagagtgggatggtaactcagtaataaatcaactagcttctctttggtaactgcttttctggat
ggccgtattgattatcgagcgtgacactcgctccatattccaataaccgctttgcaaattgtatattattgacatcgaccgc
gtaatatagtagagttatcgatcatatctatatcatccatgtacttgcttagtatatcaaatacatcttcataacagtgatacc
cgcaattattaaatctcgataatatcagaccgtacatacatagacggccattgttagatatgtgatttacagccgcgtgtc
catattttccacgataaaccttacgacgtttacatcgacgagattattattaacaaagttgttgtccgtcgtcttatccaacat
gcattgaatgataggtatacttaccatatcgccgtaatgtaagtagtttatcagtatggcttgtacgatggattcatcctgtt
gtctaaatctctttagaatgttatcgatgatgtagtggttatattctctggaatcgtacgaagtaatactacgcattacgtcg
acaagagtatgacgtctctcaataagaagattaacgatttccatgtctacattatatggggttactctaaatcgcttgtttag
ataatacgcctctaatatagggctgacgtcgtatactctacacgtgtccacatcctttattaataatctctatatctatggttg
agcaagaccagtagtattggatggaaacattgttatcgatcaaacatttaattacatccttggatagagattctctatgag
acgatatatagtaatgaagagagttcttacacatatcactgttgtacatacaggtacgaaatacgtaaccggtgctgta
acattctgatttaagaagccatagcaatacttctggtctcggattaggcgtcgttacgtatatatccaccaatccgagacc
attgattgcataattcgtattcttggacggacgtatccgtttatccacaattaggtattttagcagacgtaagtcgaaatcatt
tatattcgacttgagttcgttagaggaattcgaatagctggatatcagtagatgcacaatctgagattttacgtatctatgct
tactgtatgctcctagcggagttaatccttcgttgtttctacaaagtctctcgactccgcgagagagtaacagtcgaacaa
tcttaatgtctgtatcgcatttattggagacgtaacaatgtagcgcattgtttcctcgtctatctatatgttttgataagttgtgac
acgtttcaatttctagttttatttttttgtacgtcacatcttcatccagtagacgacatagaatacatgtgcaatccatagctatt
ctggtgctaattattcctcataagatgataaaaagtgtagtgagagagcatgaaggagatttagtatttagcagtgcgg
atatgatccaagagggtgagatagtcgttctcgttcagaatctttcgcagcataagtagtatgtcgatatacttatcgttga
agactcttccagagacgatagctgattgagtacaaagtccaatgattgcacgaagttcttcggcggttttcatggagtca
tttctgatgaaacatttaatgatctaaatttcagtttatgtttgtaccccgtattcatacttaacaaattggtattacataccatta
ataatgcaagcataaaaaatcgttagtagatgtttctaaatataggttccgtaagcaaagaatataagaatgaagcgg
taatgataaaatcaatcgttatctaaaatgatcatactcatttattttattctattatattaacacatacatttttaacagcaac
acattcaatattgtattgttatttttatattatttacacaattaacaatatattattagtttatattactgaattaataatataaaatt
cccaatcttgtcataaacacacactgagaaacagcataaacacaaaatccatcaaaaatgttgataaattatctgatg
ttgttgttcgctgctatgataatcagatcattcgccgatagtggtaacgctatcgaaacgacatcgccagaaattacaaa
cgctacaacagatattccagctatcagattatgcggtccagagggagatggatattgtttacacggtgactgtatccac
gctagagatatcgacggtatgtattgtagatgctctcatggttatacaggcattagatgtcagcatgtagtattagtagact
atcaacgttcagaaaaaccaaacactacaacgtcatatatcccatctcccggtattatgcttgtattagtaggcattattat
tattacgtgttgtctattatctgtttataggttcactcgacgaactaaactacctatacaagatatggttgtgccataatttttat
aaattttttttatgagtatttttacaaaaatgtataaagtgtatgtcttatgtatatttataaaaatgctaaatatgcgatgtatct
atgttatttgtatttatctaaacaatacctctacctctagatattatacaaaaattttttatttcggcatattaaagtaaaatcta
gttaccttgaaaatgaatacagtgggtggttccgtatcaccagtaagaacataatagtcgaatacagtatccgattgag
attttgcatacaatactagtctagaaagaaatttgtaatcatcttctgtgacgggagtccatatatctgtatcatcgtcccat
gctatattcctgttatcatcattagttaatgaaaataactctcgtgcttcagaaaagtcaaatattgtatccatacatacatct
ccaaaactatcgcttatacgtttatctttaacgatacctatacctagatggttatttactaacagacattttccagatctattg
actataactcctatagtttccacatcaaccaagtaatgatcatctattgttatataacaataacataactcttttccgtttttatc
agtatgtatatctatatcaacgtcgtcgttgtagtgaatagtagtcattgatctattatatgaaacggatatgtctagaacgg
caattgttttacgtccagttaacactttcgttgatttaaagtctagagtctttgcaaacataatatccttatccgactttatatttc
ctgtagggtggtataattttattttgcctccacatatcggtgtttccaaatatattactagacaatattccatatagttattagtt
aagggtacccaattagaacacgtacgcttattatcatcatttggatcgtatttcataaaagttattgtactatcgatgtcaac
acattctacattttttaatcgtctatatagtatttttctgatattttctataatatcagaattgtcttccatcggaagttgtatactatc
ggaatcagttacatgtttaaataattctctgatgtcattccttatacaatcaaattcattattaaacagtttaatagtctgtaga
cctttatcgtcgtaaatatccattgtcttattagttacgcttatttttatgtgtttttacgttgctttattatattttataagaatgattgtt
tgacgaatcacgagaactattaagacacattattaggtatatattataaaaaagtttttgattacgatgttataagaggaa
agaggacacattaacatcatacatcaattaactacattcttataacatcgtaatcaaaagaattgcaattttgatgtataa
caactgtcaatgggttatggaattgtatattacatattatacggtatgttggtaacgacaaataccgatcggtaattgtctg
ccggtgtaatagaattatatatatctatctattacaccggccttgtatacataataataagttgtggtagtatgatctccatat
ttataatttaggactttgtattcagtttttttggaatcataaaaaataaaaaaaagttttactaatttaaaattatttacatttttttc
actgtttagtcgcggatatggaattcgatcctgccaaaatcaatacatcatctatagatcatgtaacaatattacaataca
tagatgaaccaaatgatataagactaacagtatgcattatcacaaaaataaatccacatttggctaatcaatttcgggct
tggaaaaaacgtatcgccggaagggactatatgactaacttatctagagatacaggaatacaacaatcaaaacttac
tgaaactgtcaaaaaaatagaaacatatatggtctatatatacactacaatttagttattaattggataaccgatgtgatta
tcaatcaatattaagaaggttggtaaattggtacatagctaataatacctatacacccaataatacaacaaccatttctg
agttggatatcatcaaaatactggataaatacgaggacgtgtatagagtaagtaaagaaaaagaatgtgaaatttgct
atgaagttgtttactcaaaacgatagatactttggtttattggattcgtgtaatcatatattttgcataacatgcatcaatatat
ggcatagaacacgaagagaaaccggtgcgtcggataattgtcctatatgtcgtacccgttttagaaacataacaatga
gcaagttaactaataaataaaaagtttaatttgttgacgacgtatgtcgttattttttctcgtataaaagattaatttgattcta
atataatctttagtattggataaatatcaattcaaattaattccattagattatatcataaataaaaatagtagcacgcacta
cttcagccaaatattcttttttgaaacgccatctatcgtagtgaggacacaagtgaacctataatgagcaaatttattagta
tcggttacatgaaggactttacgtagagtggtgattccactatctgtggtacgaacggtttcatcttctttgatgccatcacc
cagatgttctataaacttggtatcctttgccaaccaatacatatagctaaactcaggcatatgttccacacatcctgaaca
atgaaattctccagaagatgttacaatgtctagatttggacatttggtttcaaccgcgttaacatatgagtgaacacaccc
atacatgaaagcgatgagaaataggattttcatcttgccaaaatatcactagaaaaaatttatttatcaattttaaaggtat
aaaaaatacttattgttgctcgaatattttgtatttgatggtatacggaagattagaaatgtaggtattatcatcaactgattc
tatggttttatgtattctatcatgtttcactattgcgttggaaataatatcatatgcttccacatatattttattttgttttaactcata
atactcacgtaattctggattattgacatatctatgaataattttagctccatgatcagtaaatattaatgagaacatagtatt
accacctaccattatttttttcatctcattcaattcttaattgcaaagatctatataatcattatagcgttgacttatggactctg
gaatcttagacgatgtacagtcatctataatcatggcatatttaatacattgttttatagcatagtcgttatctacgatgttag
atatttctctcaatgaatcaatcacacaatctaatgtaggtttatgacataatagcattttcagcagttcaatgtttttagattc
gttgatggcaatggctatacatgtatatccgttatttgatctaatgttgacatctgaaccggattctagcagtaaagatact
agagattgtttattatatctaacagccttgtgaagaagtgtttctcctcgtttgtcaatcatgttaatgtctttaagataaggta
ggcaaatgtttatagtactaagaattgggcaagcataagacatgtcacaaagaccctttttgtatgtataagtgtaaaaa
ttataacattcatagttggatttacataggtgtccaatcgggatctctccatcatcgagataattgatggcatctcccttccttt
tttagtagatatttcatcgtgtaagaatcaatattaatatttctaaagtatccgtgtatagcctctttatttaccacagttccatat
tccactagagggatatcgccgaatgtcatatactcaattagtatatgttggaggacatccgagttcattgttttcaatatca
aaaagatggtttccttatcatttctccatagtggtacaatactacacattattccgtgcggctttccattttccaaaaacaattt
gaccaaatctacatctttattgtatctataatcactatttagataatcagccataattactcgagtgcaacatgttagatcgt
ctatatatgaataagccgtgttatctattcctttcattaacaatttaacgatgtctatatctatatgagatgacttaatataatat
tgaagagctgtacaatagtttttatctataaaagacggcttgattccgtgattaattagacatttaacaacttccggacgca
catatgctctcgtatccgactctgaatacagatgagagatgatatacagatgcaatacggtaccgcaatttcgtagttga
taatcatcatacgcgtatcagtactcgtcctcataaagaacactgcagccattttctatgaacaaatcaataatttcagga
acaggatcatctgtcattacataattttctataactgaacgatggttttcacatttaacactcaagtcaaatccatgttctacc
aacacctttatcaagtcaacgtctacatttttggatttcatatagctgaatatattaaagtcatttatgttgctaaatccagtgg
cttctagtagagccatcgctatatcctttaactttaacatgtctactatttgtgtattcttctaatggggtagctgtctccaattttt
gcgtaatggattagtgccactgtctagtagtagtttgacgacctcgacattattacaatgctcattaaaaaggtatgcgtgt
aaagcattattcttgaattggttcctggtatcattaggatctctgtctctcaacatctgtttaagttcatcgagagccacctcct
cattttccaaatagtcaaacattttgactgaatgagctactgtgaactctatacacccacacaactaatgtcattaaatatc
atgtcaaaaacttgtacaattattaataaaaataatttagtgtttaaattttaccagttccagattttacacctccgttaaccc
cactttttacaccactggacgatcctcctccccacattccaccgccaccagatgtataagttttagatcctttattactacca
tcatgtccatggataaagacactccacatgccgccactaccccctttagaagacatattaataagacttaaggacaag
tttaacaataaaattaatcacgagtaccctactaccaacctacactattatatgattatagtttctatttttacagtaccttaa
ctaaagtctctagtcacaagagcaatactaccaacctacactattatatgattatagtttctatttttataggaacgcgtac
gagaaaatcaaatgtctaatttctaacggtagtgttgataaacgattatcgtcaatggatacctcctctatcatgtcgtctat
tttcttactttgttctattaacttattagcattatatattatttgattataaaacttatattgcttattagcccaatctgtaaatatcgg
attattaacatatcgtttctttgtaggtttatttaacatgtacatcactgtaagcatgtccgtaccatttattttaatttgacgcata
tccgcaatttctttttcgcagtcggttataaattctatatatgatggatacatgctacatgtgtacttataatcgactaatatga
agtacttgatacatattttcagtaacgatttattattaccacctatgaataagtacctgtgatcgtctaggtaatcaactgtttt
cttaatacattcgatggttggtaatttactcagaataatttccaatatcttaatatataattctgctatttctgggatatatttatct
gccagtataacacaaatagtaatacatgtaaacccatattttgttattatattaatgtctgcgccattatctattaaccattct
actaggctgacactatgcgacttaatacaatgataaagtatactacatccatgtttatatcatcaatatacggcttacaaa
gttttagtatcgataacacatccaactcacgcatagagaaggtagggaataatggcataatatttattaggttatcatcat
tgtcattatctacaactaagtttccattttttaaaatatactcgacaactttaggatctctattgccaaatttttgaaaatatttatt
tatatgcttaaatctatataatgtagctccttcatcaatcatacatttaataacattgatgtatactgtatgataagatacatat
tctaacaatagatcttgtatagaatctgtatatcttttaagaattgtggatattattacgtaaactattacacaattctaaaata
taaaacgtatcacggtcgaataatagttgatcaactatataattatcgattttgtgatttttcttcctaaactgtttacgtaaat
agttagatagaatattcattagttcatgaccactatagttactatcgaataacgcgtcaaatatttcccgtttaatatcgcatt
tgtcaagataataatagagtgtggtatgttcacgataagtataataacgcatctctttttcgtgtgaaattaaatagtttatta
cgtccaaagatgtagcataaccatcttgtgacctagtaataatataataatagagaactgttttacccattctatcatcata
atcagtggtgtagtcgtaatcgtaattgtctaattcatcatcccaattataatattcaccagcacgtctaatctgttctattttg
atcttgtatccatactgtatgttgctacatgtaggtattcctttatccaataatagtttaaacacatctacattgggatttgatgtt
gtagcgtatttttctacaatattaataccatttttgatactatttatttctatacctttcgaaattagtaatttcaataagtctatatc
gatgttatcagaacatagatattcgagtatatcaaaatcattgatatttttatagtcgactgacgacaataacaaaatcac
aacatcgtttttgatattattatttttcttggtaacgtatgcctttaatggagtttcaccatcatactcatataatggatttgcacc
actttctatcaatgattgtgcactgctggcatcgatgttaaatgttttacaactatcatagagtatcttatcgttaaccatgatt
ggttgttgatgctatcgcattttttggtttctttcatttcagttatgtatggatttagcacgtttgggaagcatgagctcatatgatt
tcagtactgtagtgtcagtactattagtttcaataagatcaatctctagatctatagaatcaaaacacgataggtcagaa
gataatgaatatctgtaggcttcttgttgtactgtaacttctcgttttgttagatgtttgcatcgtgctttaacatcaatggtaca
aattttatcctcgctttgtgtatcatattcgtccctactataaaattgtatattcagattatcatgagatgtgtatacgctaacgg
tatcaataaacggagcacaccatttagtcataaccgtaatccaaaaatttttaaagtatatcttaacgaaagaagttgtg
tcattgtctacggtgtatggtactagatcctcataagtgtatatatctagagtaatgtttaatttatcaaatggttgataatatg
gatcctcatgacaatttccgaagatggaaatgagatatagacatgcaataaatctaattgcggacatggttactccttaa
aaaaatacgaataatcaccttggctatttagtaagtgtcatttaacactatactcatattaatccatggactcataatctcta
tacgggattaacggatgttctatatacggggatgagtagttttcttctttaactttatactttttactaatcatatttagactgatg
tatgggtaatagtgtttaaagagttcgttctcatcatcagaataaatcaatatctctgtttttttgttatacagatgtattacagc
ctcatatattacgtaatagaacgtgtcatctaccttattaactttcaccgcatagttgtttgcaaatacggttaatcctttgacc
tcgtcgatttccgaccaatctgggcgtataatgaatctaaactttaatttcttgtaatcattcgaaataatttttagtttgcatcc
gtagttatcccctttatgtaactgtaaatttctcaacgcgatatctccattaataatgatgtcgaattcgtgctgtatacccat
actgaatggatgaacgaataccgacggcgttaatagtaatttactttttcatctttacatattgggtactagttttactatcat
aagtttataaattccacaagctactatggaataagccaaccatcttagtataacacacatgtcttaaagtttattaattaatt
acatgttgttttatatatcgctacgaatttaaacagagaaatcagtttaggaaaaaaaaatatctatctacatcatcacgt
ctctgtattctacgatagagtgctactttaagatgagacatatccgtgtcatcaaaaatatactccattaaaatgattattcc
ggcagcgaacttgatattggatatatcacaacctttgttaatatctacgacaatagacagcagtcccatggttccataaa
cagtgagtttatctttctttgaagagatattttgtagagatcttataaaactgtcgaatgacatcgcatttatatctttagctaa
atcgtatatgttaccatcgtaatatctaaccgcgtctatcttaaacgtttccatcgctttaaagacgtttccgatagatggtct
catttcatcagtcatactgagccaacaaatataatcgtgtataacatctttgatagaatcagactctaaagaaaacgaat
cggctttattatacgcattcatgataaacttaatgaaaaatgtttttcgttgtttaagttggatgaatagtatgtcttaataattg
ttattatttcattaattaatatttagtaacgagtacactctataaaaacgagaatgacataactagttatcaaagtgtctagg
acgcgtaattttcatatggtatagatcctgtaagcattgtctgtattctggagctattttctctatatctaatttctgaacgttcac
caatgtctctagccactttggcactaatagcgatcattcgcttagcgtcttctatattattaactggttgattcaatctatctag
caatggaccgtcggacagcgtcattctcatgttcttaatcaatgtacatacatcgccgtcatctaccaattcatccaacaa
cataagctttttaaaatcatcattataataggtttgatcgttgtcatttctccaaagaatatatctaataagtagagtcctcat
gattagttaacaactattttttatgttaaatcaattagtacaccgctatgtttaatacttattcatattttagtttttaggattgaga
atcaatacaaaaattaatgcatcattaattttagaaatacttagtttccacgtagtcaatgaaacatttgaactcatcgtac
aggacgttctcgtacaggacgtaactataaaccggtttatatttgttcaagatagatacaaatccgataactttttttacga
attctacgggatccactttaaaagtgtcataccgggttctttttatttttttaaacagattaatggtgtgatgttgattaggtctttt
acgaatttgatatagaatagcgtttacatattctccataatggtcaatcgccatttgttcgtatgtcataaattctttaattatat
gacactgtgtattatttagttcatccttgttcatcattaggaatctatccaatatggcaattatactagaactataggtgcgttg
tatacacatattgatgtgtctgtttatacaatccatgctactaccttcgggtaaaattgtagcatcatataccatttctagtact
ttaggttcattgttatccattgcagaggacgtcatgatcgcatcctaaaaaaatatattatttttatgttattttgttaaaaataa
tcatcgaatacgaatcatccagtccactgaatagcaaaatctttactattttggtatcttccaatgtggctgcctgatgtaat
ggaaattcattctctagaagatttttcaatgctccagcgttcaacaacgtacatactagacgcacgttattatcagctattg
cataatacaaggcactatgtccatggacatccgccttaaatgcatctttgctagagagaaagcttttcagctgcttagact
tccaagtattaattcgtgacagatccatgtctgaaacgagacgctaattagtgtataatttttgtcatattgcaccagaatta
ataatatctctaatagatctgattagtagatacatggctatcgcaaaacaacatatacacatttaataaaaataatatttat
taagaaaattcagatttcacgtacccatcaatataaataaaataatgattccttacaccgtacccatattaaggagattct
accttacccataaacaatataaatccagtaatatcatgtctgatgatgaacacaaatggtgtattaaattccagtttttcag
gagatgatctcgccgtagctaccataatagtagatgcctctgctacagttccttgttcgtcgacatctatctttgcattctga
aacattttataaatatataatgggtccctagtcatatgtttaaacgacgcattatctggattaaacatactaggagccatca
tttcggctatcgacttaatatccctcttattttcgatagaaaatttagggagtttaagattgtacactttattccctaattgaaac
gaccaatagtctaattttgcagccgtaatagaatctgtgaaatgggtcatattatcacctattgccaggtacatactaatat
tagcatccttatacggaaggcgtaccatgtcatattctttgtcatcgattgtgattgtatttccttgcaatttagtaactacgttc
atcatgggaaccgttttcgtaccgtacttattagtaaaactagcattgcgtgttttagtgatatcaaacggatattgccatat
acctttaaaatatatagtattaatgattgcccatagagtattattgtcgagcatattagaatctactacattagacataccg
gatctacgttctactatagaattaattttattaaccgcatctcgtctaaagtttaatctatataggccgaatctatgatattgttg
ataatacgacggtttaatacacacagtattatctacgaaactttgataagttagatcagtgtacgtatatttagatgttttca
gcttagctaatcctgatattaattctgtaaatgctggacccagatctctttttctcaaatccatagtcttcaataattctattcta
gtattacctgatgcaggcaatagcgacataaacatagaaaacgaataaccaaacggtgagaagacaatattatcat
cttgaatatttttatacgctactataccggcattggtaaatccttgtagacgataggtagacgctgaacacgttaacgata
gtatcaataacgcaatcatgattttatggtattaataattaaccttatttttatgttcggtataaaaattattgatgtctacacat
ccttttgtaattgacatctatatatccttttgtataatcaactctaatcactttaacttttacagttttccctaccagtttatccctat
attcaacatatctatccatatgcatcttaacactctctgccaagatagcttcagagtgaggatagtcaaaaagataaata
tatagagcataatcattctcgtatactctgccctttattacatcgcccgcattgggcaacgaataacaaaatgcaagcat
cttgttaacgggctcgtaaattgggataaaaattatgtttttatatctattttattcaagagaatattcaggaatttctttttccgg
ttgtatctcatcgcagtatatatcatttgtacattgtttcatattttttaatagtttacaccttttagtaggactagtatcgtacaatt
catagctgtattttgaattccaatcacgcataaaaatatcttctaattgttgacgaagacctaatccatcatccggtgtaat
attaatagatgctccacatgtatccgtaaagtaatttcctgtccaatttgaggtacctatataggccgttttatcggttaccat
atatttggcatggtttaccctagaatacggaatgggaggatcagcatctggtacaataaatagctttacttctatatttatgt
ttttagattttagcatagcgatagatcttaaaaagtttctcatgataaacgaagatcgttgccagcaactaatcaatagctt
aacggatacttgtctgtctatagcggatcttcttaattcatcttctatataaggccaaaacaaaattttacccgccttcgaat
aaataatagggataaagttcataacagatacataaacgaatttactcgcatttctaatacatgacaataaagcggttaa
atcattggttctttccatagtacatagttgttgcggtgcagaagcaataaatacagagtgtggaacaccacttacgttaat
actaagaggatgatctgtattataatacgacggataaaagtttttccaattatatggtagattgttaactccaagatacca
gtatacctcaaaaatttgagtgagatccgctgccaagttcctattattgaagatcgcaatacccaattctttgacctgagtt
agtgatctccaatccatgttagcgcttcctaaataaatatgtgtattatcagatatccaaaattttgtatgaagaactcctcc
taggatatttgtaatatctatgtatcgtacttcaactccggccatttgtagtctttcaacatcctttaatggtttgttagatttattg
acggctactctaactcgtactcctcttttgggtaattgtacaatctcgtttaatattatcgtgccgaaattcgtacccacttcat
ccgataaactccaataaaaagatgatatatctagtgtttttgtggtattggatagaatttccctccacatgttaaatgtaga
caaatatactttatcaaattgcatacctataggaatagtctctgtaatcactgcgattgtattatccggattcattttatttgtta
aaagaataatcctatatcacttcactctattaaaaatccaagtttctatttctttcatgactgattttttaacttcatccgtttcctt
atgaagatgatgtttggcaccttcataaatttttatttctctattacaatttgcatgttgcatgaaataatatgcacctaaaac
atcgctaatctcattgtttgttccctggagtatgagagtcggggtgttaatcttggaaattatttttctaaccttgttggtagcctt
caagacctgactagcaaatccagccttaattttttcatgattgattaatgggtcgtattggtatttataaactttatccatatct
ctagatactgattctggacatagctttccgactggcgcatttggtgtgatggttcccataagtttggcagctagcagattca
gtcttgaaacagcatctgcattaactagaggagacattagaatcattgctgtaaacaagtttggattatcgtaagaggct
agtatagaaattgttgctcccatggaatgacccaataagtagatttaatagttaccacgtgctgtaccaaagtcatcaat
catcattttttcaccattacttcttccatgtccaatatgatcatgtgagaatactaaaattcctaacgatgatatgttttcagct
agttcgtcataacgtccagaatgtttaccagctccatgacttatgaatactaatgccttaggatatgtaatcattgtccaga
ttgaacatacagtttgcactcatgattcacgttatataactatcaatattaacagttcgtttgatgatcatattatttttatgtttta
ttgataattgtaaaaacatacaattaaatcaatatagaggaaggagacggctactgtcttttgtgagatagtcatggcga
ctaaattagattatgaggatgctgttttttactttgtggatgatgataaaatatgtagtcgcgactccatcatcgatctaatag
atgaatatattacgtggagaaatcatgttatagtgtttaacaaagatattaccagttgtggaagactgtacaaggaattg
atgaagttcgatgatgtcgctatacggtactatggtattgataaaattaatgagattgtcgaagctatgagcgaaggag
accactacatcaattttacaaaagtccatgatcaggaaagtttattcgctaccataggaatatgtgctaaaatcactgaa
cattggggatacaaaaagatttcagaatctagattccaatcattgggaaacattacagatctgatgaccgacgataat
ataaacatcttgatactttttctagaaaaaaaattgaattgatgatataggggtcttcataacgcataattattacgttagca
ttctatatccgtgttaaaaaaaattatcctatcatgtatttgagagttttatatgtagcaaacatgatagctgtgatgccaata
agctttagatattcacgcgtgctagtgttagggatggtattatctggtggtgaaatgtccgttatataatctacaaaacaat
catcgcatatagtatgcgatagtagagtaaacatttttatagtttttactggattcatacatcgtctacccaattcggttatga
atgaaattgtcgccaatcttacacccaaccccttgttatccattagtatagtattaacttcgttatttatgtcataaactgtaa
atgattttgtagatgccatatcatacatgatattcatgtccctattataatcattactaactttatcacaatatatgttgataata
tctatatatgatctagtctttgtgggcaactgtctatacaagtcgtctaaacgttgtttactcatatagtatcgaacagccatc
attacatggtcccgttccgttgatagataatcgagtatgttagtggacttgtcaaatctatataccatattttctggaagtgg
atatacatagtcgtgatcaacattattgctagcctcatcttctatatcctgtactataccatctacataatctacgatattatta
cacataaacatcgacaacatactattgtttattatctaagtcctgttgatccaaacccttgatctcctctatttgtactatctag
agattgtacttcttccagttctggataatatatacgttgatagattagctgagctattctatctccagtatttacattaaacgta
cattttccattattaataagaatgactcctatgtttcccctataatcttcgtctattacaccacctcctatatcaatgccttttagt
gacagaccagacctaggagctattctaccatagcaaatcttaggcatggacatactaatatctgtcttaattaactgtctt
tctcctggagggatagtataatcgtaagcgctatacaaatcatatccggcagcacccggcgattgcctagtaggagat
ttagctctgttagtttccttaacaaatctaactggtgagttaatattcatgttgaacataaaactaatattttatttcaaaattatt
taccatcccatatattccatgaataagtgtgatgattgtacacttctatagtatctatatacgattcacgataaaatcctcct
atcaatagcagtttattatccactatgatcaattctggattatccctcggataaataggatcatctatcagagtccatgtatt
gctggattcacaataaaattccgcatttctaccaaccaagaataaccttctaccgaacactaacgcgcatgatttataat
gaggataataagtggatggtccaaactgccactgatcatgattgggtagcaaatattctgtagttgtatcagtttcagaat
gtcctcccattacgtatataacattgtttatggatgccactgctggattacatctaggtttcagaagactcggcatattaacc
caagcagcatccccgtggaaccaacgctcaacagatgtgggatttggtagacctcctactacgtataatttattgttagc
gggtatcccgctagcatacagtctggggctattcatcggaggaattggaatccaattgtttgatatataatttacagctata
gcattgttatgtatttcattgttcatccatccaccgatgagatatactacttctccaacatgagtacttgtacacatatggaat
atatctataatttgatccatgttcataggatactctatgaatggatacttgtatgatttgcgtggttgtttatcacaatgaaatat
tttggtacagtctagtatccattttacattatttatacctctgggagaaagataatttgacctgattacatttttgataaggagt
agcagatttcctaatttatttcttcgctttatataccacttaatgacaaaatcctcatctggaacatttagttcatcgctttctag
aataagtttcatagatagataatcaaaattgtctatgatgtcatcttccagttccaaaaagtgtttggcaataaagtttttagt
atgacataagagattggatagtccgtattctatacccatcatgtaacactcgacacaatattcctttctaaaatctcgtag
gataaagtttatacaagtgtagatgataaattctacagaggttaatatagaagcacgtaataaattgacgacgttatga
ctatctatatatacctttccagtatatgagtaaataactatagaagttagactgtgaatgtcaaggtctagacaaaccctc
gtaactggatctttatttttcgtgtatttttgacgtaaatgtgtgcgaaagtaaggagataactttttcaatatcgtagaattga
ctattatattgcctcctatggcatcaataattgttttgaatttcttagtcatagacaatgctaatatattcttacagtacacagta
ttgacaaatatcggcatttatgtttctttaaaagtcaacatctaaagaaaaatgattatcttcttgagacataactcccattttt
tggtattcacccacacgtttttcgaaaaaattagttttaccttctaatgatatattttccatgaaatcaaacggattggtaaca
ttataaatttttttaaatcccaattcagaaatcaatctatccgcgacgaattctatatatgttttcatcatttcacaattcattcct
ataagtttaactggaagagccgcagtaagaaattcttgttcaatggataccgcatctgttataatagatctaacggtttctt
cactcggtggatgcaataaatgtttaaacatcaaacatgcgaagtcgcagtgtagaccctcgtctctactaatcaattcg
ttggaaaacgtgagtccgggcattaggccacgctttttaagccaaaatatggaagcgaatgatccggaaaagaaga
ttccttctactgcagcaaaggcaataagtctctctccataaccggcgctgtcatgtatccacttttgagcccaatcggcctt
cttttttacacaaggcatcgtttctatggcattaaagagatagtttttttcattactatctttaacataagtatcgatcaaaaga
ctatacatttccgaatgaatgttttcaatggccatctgaaatccgtagaaacatctagcctcggtaatctgtacttctgtaca
aaatcgttccgccaaattttcattcactattccgtcactggctgcaaaaaacgccaatacatgttttataaaatatttttcgtc
tggtgttagtttattccaatcattgatatctttagatatatctacttcttccactgtccaaaatgatgcctctgcctttttatacatg
ttccagatgtcatgatattggattgggaaaataacaaatctatttggatttggtgcaaggatgggttccataactaaattaa
caataacaataaattttttttcagttatctatatgcctgtacttggatcttttgtacatcgatatcgccgcaatcactacaataa
ttacaagtattattgatagcattgttattagtactatcataattaaattatcgttattatcattttgtaattgtgacatcatactaga
taaatcgtttgcgagattgttgtgggaagcgggcatggaggatgaattatcgttattattatttaaagcctcccattcggatt
cacaaatatggcgcgcgttcaacattttatggaaacagataacaagaaaactcgtcatcgttcaaatttttaacgatagt
aaaccgattaaacgtcgagctaatttctaacgctagcgactctgttggatatgggtttccagatatatatcttttcagttccc
ctacgtatctataatcatctgtaggaaatggaagatatttccatttatctactgttcctaatatcatatgtggtggtgtagtag
aaccattaagcgcgaaagatgttatttcgcatcgtattttaacttcgcaataatttctggttagataacgcactctaccagt
caagtcaatgatattagcctttacagatatattcatagtagtcgtaacgatgactccatcttttagatgcgatactcctttgta
tgtaccagaatcttcgtacctcaaactcgatatatttaaacaagttaatgagatattaacgcgttttatgaatgatgatatat
aaccagaagttttatcctcggtggctagcgctataaccttatcattataataccaactagtgtgattaatatgtgacacgtt
agtgtgggtacaaatatgtacattatcgtctacgtcgtattcgatacatccgcatacagccaacaaatataaaatgaca
aatactctaacgccgttcgtacccatcttgatgcggtttaataaatgttttgatttcaatttattgtaaaaaaagattcggtttt
atactgttcgatattctcattgcttatattttcatctatcatctccacacagtcaaatccgtggttagcatgcacctcatcaacc
ggtaaaagactatcggactcttctatcattataactctagaatatttaatttggtcattattaatcaagtcaattatcttattttta
acaaacgtgagtattttactcattttttataaaaacttttagaaatatacagactctatcgtgtgtctatatcttctttttatatcca
atgtatttatgtctgatttttcttcatttatcatatataatggtccaaattctacacgtgcttcggattcatccagatcattaaggtt
cttataattgtaacatccttctcttccctcttctacatcttccttcttattcttattcttagcgtcacagaatctaccacagcagga
tcccatgacgagcgtcatattaaactaatccattttcaattataatatacgattagtaatgaccattaaaataaaaatattct
tcataaccggcaagaaagtgaaaagttcacattgaaactatgtcagtagtatacatcatgaaatgatgatatatatata
ctctattttggtggaggattatatgatataattcgtggataatcattcttaagacacatttcttcattcgtaaatcttttcacgtta
aatgagtgtccatattttgcaatttcttcatatgatggcggtgtacgtggacgaggctgctcctgttcttgttgtagtcgccga
ctgtcgtgtctgcgtttagatccctccattatcgcgattgcgtagatggagtactattttataccttgtaattaaatttttttattaa
ttaaacgtataaaaacgttccgtatctgtatttaagagccagatttcgtctaatagaacaaatagctacagtaaaaataa
ctagaataattgctacacccactagaaaccacggatcgtaatacggcaatcggttttcgataataggtggaacgtatat
tttatttaaggacttaacaattgtctgtaaaccacaatttgcttccgcggatcctgtattaactatctgtaaaagcatatgttg
accgggcggagccgaacattctccgatatccaatttctgtatatctataatattattaacctccgcatacgcattacagttc
ttttctagcttggataccgcactaggtacatcgtctagatctattcctatttcctcagcgatagctcttctatccttttccggaa
gcaatgaaatcacttcaataaatgattcaaccatgagtgtgaaactaagtcgagaattactcatgcatttgttagttattc
ggagcgcgcaatttttaaactgtcctataacctctcctatatgaatagcacaagtgacattagtagggatagaatgttga
gctaatttttgtaaataactatctataaaaagattatacaaagttttaaactctttagtttccgccatttatccagtctgagaa
aatgtctctcataataaatttttccaagaaactaattgggtgaagaatggaaacctttaatctatatttatcacagtctgtttt
ggtacacatgatgaattcttccaatgccgtactaaattcgatatctttttcgatttctggatatgtttttaataaagtatgaaca
aagaaatggaaatcgtaataccagttatgtttaactttgaaattgttttttattttcttgttaatgattccagccacttgggaaa
agtcaaagtcgtttaatgccgatttaatacgttcattaaaaacaaactttttatcctttagatgaattattattggttcattgga
atcaaaaagtaagatattatcgggtttaagatctgcgtgtaaaaagttgtcgcagcatggtagttcgtaaattttaatgtat
aacagagccatctgtaaaaagataaactttatgtattgtaccaaagatttaaatcctaatttgatagctagctcggtatct
actttatctgccgaatacagtgctaggggaaaaattataatatttcctctttcgtattcgtagttagttctcttttcatgttcgaa
aaagtgaaacatgcggttaaaatagtttataacattaatattactgttaataactgccggataaaagtgggatagtaattt
cacgaatttgatactgtcctttctctcgttaaacgcctttaaaaaaactttagaagaatatctcaatgatagttcctgaccat
ccatagtttgtatcaataatagcaacatatgaagaacacgtttatacagagtatgtaaaaatgttaatttatagtttaatcc
catggcccacgcacacacgattaattttttttcatctccctttagattgttgtatagaaatttgggtactgtgaactccgccgt
agtttccatgggactatataattttgtggcctcgaatacaaattttactacatagttatctatcttaaagactataccatatcct
cctgtagatatgtgataaaaatcgtcgtttataggataaaatcgtttatccttttgttggaaaaaggatgaattaatgtaatc
attctcttctatctttagtagtgtttccttattaaaattcttaaaataatttaacaatctaactgatggagcccaattttggtgtaa
atctaattgggacattatattgttaaaatacaaacagtctcctaatataacagtatctgataatctatggggagacatcca
ttgatattcaggggatgaatcattggcaacacccatttattgtacaaaaagccccaatttacaaacgaaagtccaggttt
gatagagacaaactattaactattttgtctctgtttttaatttctttggtaatgaaattattcacaatatcagtatcttctttatcta
ccagagattttactaacttgataaccttggctgtctcattcaatagggtagtaatatttgtatgtgtgatattgatatcttttaga
agtgattctttgatggtgccagcatacgaattacaataatgcagaaactcggttaacatgcaggaattatagtaagcca
attccaattgttgcctgtgttgtattagagtgtcaatatgagcaatggtgtccttgcgtttctctgatagaatgcgagcagcg
attttggcgttatcatttgacgatatttctggaatgacgaatcctgtttctactaactttttggtaggacaaagtgaaacaatc
aagaagatagcttctcctcctatttgtggaagaaattgaactcctctagatgatctccttgacagatattggaccgaatta
cagaagtacctggaatgtaaagccctgaaaccccctcattttttaagcagattgttgccgtaaatcctgcactatgccca
agatagagagctcctttggtgaatccatctctatgtttcagtttaaccaagaaacagtcagctggtctaaaatttccatctc
tatctaatacagcatctaacttgatgtcaggaactatgaccggttatgttatatgtaacattgagtaaatccttaagttcata
atcatcactgtcatcagttatgtacgatccaaacaatgtttctactggcatagtggatacgaagatgctatccatcagaat
gtttccctgattagtattttctatatagctattcttctttaaacgattttccaaatcagtaactatgttcatttttttaggagtaggac
gcctagccagtatggaagaggattttctagatcctctcttcaacatctttgatctcaatggaatgcaaaaccccatagtgt
aacaaccaacgataaaaataatattgtttttcactttttataattttaccatctgactcatggattcattaatatctttataaga
gctactaacgtataattctttataactgaactgagatatatacaccggatctatggtttccataattgagtaaatgaatgctc
ggcaataactaatggcaaatgtataaaacaacgaaattatactagagttgttaaagttaatattttctatgagctgttcca
ataaattatttgttgtaactgcgttcaagtcataaatcatcttgatactatccagtaaaccgtttttaagttctggaatattatta
tcccattgtaaagcccctaattcgactatcgaatatcctgctctgatagcagtttcaatatcgacggacgtcaatactgta
ataaaggtggtagtattgtcatcatcgtgataaactactggaatatggtcgttagtaggtacggtaactttacacaacgc
gatatataactttccttttgtaccatttttaacgtagttgggacgtcctgcagggtattgttttgaagaaatgatatcgagaac
agatttgatacgatatttgttggattcctgattatttactataatataatctagacagatagatgattcgataaatagagaag
gtatatcgttggtaggataatacatccccattccagtattctcggatactctattaatgacactagttaagaacatgtcttct
attctagaaaacgaaaacatcctacatggactcattaaaacttctaacgctcctgattgtgtctcgaatgcctcgtacaa
ggatttcaaggatgccatagattctttgaccaacgatttagaattgcgtttagcatctgatttttttattaaatcgaatggtcg
gctctctggtttgctaccccaatgataacaatagtcttgtaaagataaaccgcaagaaaatttatacgcatccatccaaa
taaccctagcaccatcggatgatattaatgtattattatagattttccatccacagttattgggccagtatactgttagcaac
ggtatatcgaatagattactcatgtaacctactagaatgatagttcgtgtactagtcataatatctttaatccaatctaaga
aatttaaaattagattttttacactgttaaagttaacaaaggtattacccggatacgtggatatcatatatggtattggtccat
tatcagtaatagctccataaactgatacggcgatggtttttatatgtgtttgatctaacgaggaagaaattcgcgcccaca
attcatctctagatatgtatttaatatcaaacggtaacacatcaatttcgggacgcgtatatgtttctaaatttttaatccaaat
ataatgatgacctatatgccctattatcatactgtcaactatagtacacctagagaacttacgatacatctgtttcctataat
cgttaaattttacaaatctataacatgctaaaccttttgacgacaaccattcattaatttctgatatggaatctgtattctcaat
accgtatcgttctaaagccagtgctatatctccctgttcgtgagaacgctttcgtataatatcgatcaacggataatctgaa
gtttttggagaataatatgactcatgatctatttcgtccataaacaatctagacataggaattggaggcgatgatcttaattt
tgtgcaatgagtcgtcaatcctataacttctaatattgtaatattcatcatcgacataacactatctatgttatcatcgtatatt
agtataccatgaccttcttcatttcgtgccaaaatgatatacagtcttaaatagttacgcaatatctcaatagtttcataattg
ttagctgttttcatcaaggtttgtatcctgtttaacatgatggcgttctatacgtttctattttttaaatttttaacgatttactgtggc
tagatacccaatctctctcaaatatttttttagcctcgcttacaagctgtttatctatactattaaaactgacgaatccgtgattt
tggtaatgggttccgtcgaaatttgccgaagtgatatgaacatattcgtcgtcgactatcaacaattttgtattattctgaat
agtgaaaaccttcacagatagatcattttgaacacacaacgcgtctagacttctggcggttgccatagaatatacgtcg
ttcttatcccaattaccaactagaagtctgatcttaactcctctattaatggctgcttctataatggagttgtaaatgtcgggc
caatagtagctattaccgtcgacacgtgtagtgggaactatggccaaatgttcaatatctatactagtcttagccgacttg
agtttatcaataactacatcagtgtctagatctctagaatatcccaataggtgttccggagaatcagtaaagaacactcc
acctataggattcttaatatgatacgcagtgctaactggcagacaacaagccgcagagcataaattcaaccatgaatt
ttttgcgctattaaaggctttaaaagtatcaaatcttctacgaagatctgtggccagcgggggataatcagaatatacac
ctaacgttttaatcgtatgtatagatcctccagtaaatgacgcgtttcctacataacatctttcattatctgacacccaaaaa
caaccgagtagtagtcccacattattttttttatctatattaacggttataaaatttatatccgggcagtgactttgtagctctc
ccagatttcttttccctcgttcatctagcaaaactattattttaatccctttttcagatgcctcttttagtttatcaaaaataagcg
ctcccctagtcgtactcagaggattacaacaaaaagatgctatgtatatatatttcttagctagagtgataatttcgttaaa
acattcaaatgttgttaaatgatcggatctaaaatccatattttctggtagtgtttctaccagcctacattttgctcccgcagg
taccggtgcaaatggccacatttagttaacataaaaacttatacatcctgttctatcaacgattctagaatatcatcggct
atatcgctaaaattttcatcaaagtcgacatcacaacctaactcagtcaatatattaagaagttccatgatgtcatcttcgt
ctatttctatatccgtatccattgtagattgttgaccgattatcgagtttaaatcattactaatactcaatccttcagaatacaa
tctgtgtttcattgtaaatttataggcggtgtatttaagttggtagattttcaattatgtatcaatatagcaacagtagttcttgct
cctccttgattctagcatcctcttcattattttcttctacgtacataaacatgtccaatacgttagacaacacaccgacgatg
gcggccgccacagacacgaatatgactaaaccgatgaccatttaaaaacccctctctagctttcacttaaactgtatcg
attattcttttagaacatgtataatataaaaacattattctatttcgaatttaggcttccaaaaatttttcatccgtaaaccgat
aataatatatatagacttgttaatagtcggaataaatagattaatgcttaaactatcatcatctccacgattagagataca
atatttacattttttttgctgtttcgaaactttatcaatacacgttaatacaaacccaggaaggagatattgaaactgaggct
gttgaaaatgaaacggtgaatacaataattcagataatgtaaaatcatgattccgtattctgatgatattagaactgctaa
tggatgtcgatggtatgtatctaggagtatctattttaacaaagcatcgatttgctaatatacaattatcattttgattaattgtt
attttattcatattcttaaaaggtttcatatttatcaattcttctacattaaaaatttccatttttaatttatgtagccccgcaatact
cctcattacgtttcattttttgtctataatatccattttgttcatctcggtacatagattatccaattgagaagcgcatttagtagtt
ttgtacattttaagtttattgacgaatcgtcgaaaactagttatagttaacattttattatttgataccctgatattaatacccct
gccgttactattatttataactgatgtaatccacgtaacattggaattaactatcgatagtaatgcatcgacgcttccaaaa
ttgtctattataaactcaccgataatttttttattacatgttttcatattcattaggattattaaatctttaatcttactacgattgtat
gcgttgatattgcaagacgtcattctaaaagacggaggatctccatcaaatgccagacaatcacgtacaaagtacat
ggaaataggttttgttctattgcgcatcatagatttatatagaacacccgtagaaatactaatttgttttactctataaaatac
taatgcatctatttcatcgttttgtataacgtctttccaagtgtcaaattccaaatttttttcattgatagtaccaaattcttctatct
ctttaactacttgcatagataggtaattacagtgatgcctacatgccgttttttgaaactgaatagatgcgtctagaagcga
tgctacgctagtcacaatcaccactttcatatttagaatatatatatgtaaaaatatagtagaatttcattttgttttttttctatg
ctataaatgaattctcattttgcatctgctcatactccgttttatatcaataccaaagaaggaagatatctggttctaaaagc
cgttaaagtatgcgatgttagaactgtagaatgcgaaggaagtaaagcttcctgcgtactcaaagtagataaaccctc
atcacccgcgtgtgagagaagaccttcgtccccttccagatgcgagagaatgaataacccaggaaaacaagttccg
tttatgaggacggacatgctacaaaatatgttcgcggctaatcgcgataatgtagcttctagacttttgtcctaaaataca
attatatccttttcgatattaataaatccgtgtcgtccaggttttttatctctttcagtatgtgaatagataggtattttatctctattc
atcatcgaatttaagagatccgataaacattgtttgtattctccagatgtcagcatctgatacaacaatatatgtgcacata
aacctctggcacttatttcatgtaccttccccttatcactaaggagaatagtatttgagaaatatgtatacatgatattatcat
gaattagatatacagaatttgtaacactctcgaaatcacacgatgtgtcggcgttaagatctaatatatcactcgataac
acattttcatctagatacactagacattttttaaagctaaaatagtctttagtagtaacagtaactatgcgattattttcatcg
atgatacatttcatcggcatattattacgcttaccatcaaagactataccatgtgtatatctaacgtattctagcatggttgc
catacgcgcattaaacttttcaggatctttggatagatcttccaatctatctatttgagaaaacatttttatcatgttcaatagtt
gaaacgtcggatccactatatagatattatctataaagattttaggaactacgttcatggtatcctggcgaatattaaaac
tatcaatgatatgattatcgttttcatcttttatcaccatatagtttctaagatatgggattttacttaatataatattatttcccgta
ataaattttattagaaatgccaaatctataagaaaagtcctcgaattagtttgaagaatatctatatcgccgtaccgtatat
ttggattaattagatatagagaatatgatccgtaacatatacaacttttattatggcgtctaagatattcttccatcaacttatt
aacatttttgactagggaagatacattatgacgtcccattacttttgccttgtctattactgcgacgttcatagaatttagcat
atctcttgccaattcttccattgatgttacattataagaaattttagatgaaattacatttggagctttaatagtaagaactcct
aatatgtccgtgtatgtggtcactaatacagattgtagttctataatcgtaaataatttacctatattatatgtttgagtctgttta
gaaaagtagctaagtatacgatcttttatttctgatgcagatgtatcaacatcggaaaaaaatctttttttattcttttttactaa
agatacaaatatgtctttgttaaaaacagttattttctgaatatttctagcttgtaattttaacatatgatattcgttcacactag
gtactctgcctaaataggtttctataatctttaatgtaatattaggaaaagtattctgatcaggattcctattcattttgaggatt
taaaactctgattattgtctaatatggtctcaacacaaactttttcacagagcgatagagtttttgataactcgtttttcttaag
aaatataaaactactgtctccagagctcgctctatcttttattttatttaattcgatacaaactcctgatactggttcagaaag
taattcattaattttcagtcctttatagaagatatttaatatagataatacaaaatcttcagtttttgatatcgatctgattgatcc
tagaactagatatattaataacgtgctcattaggcagtttatggcagcttgataattagatatagtatattccagttcatattt
attagataccgcattgcccagattttgatattctatgaattcctctgaaaataaatccaaaataactagacattctattttttgt
ggattagtgtactctcttccctctatcatgttcactactggtgtccacgatgataaatatctagagggaatataatatagtcc
ataggatgccaatctagcaatgtcgaataactgtaattttattcttcgctcttcattatgaattgattcttgaggtataaaccta
acacaaattatattattagacttttcgtatgtaatgtctttcatgttataagtttttaatcctggaatagaatctattttaatgagg
cttttaaacgcagagttctccaacgagtcaaagcataatactctgttggttttcttatatacgatgttacgattttcttctttgaa
tggaataggtttttgaattagtttataattacaacataatagataaggaagtgtgcaaatagtacgcggaaaaaacata
atagctcccctgttttcatccatggttttaagtaaatgatcactggcttctttagtcaatggatattcgaacattaaccgtttca
tcatcattggacagaatccatatttcttaatgtaaagagtgatcaaatcattgtgtttattgtaccatcttgttgtaaatgtgtat
tcggttatcggatctgctcctttttctattaaagtatcgatgtcgatctcgtctaagaattcaactatatcgacatatttcatttgt
atacacataaccattactaacgtagaatgtataggaagagatgtaacgggaacagggtttgttgattcgcaaactattc
taatacataattcttctgttaatacgtcttgcacgtaatctattatagatgccaagatatctatataattattttgtaagatgatg
ttaactatgtgatctatataagtagtgtaataattcatgtatttcgatatatgttccaactctgtctttgtgatgtctagtttcgtaa
tatctatagcatcctcaaaaaatatattcgcatatattcccaagtcttcagttctatcttctaaaaaatcttcaacgtatgga
atataataatctattttacctcttctgatatcattaatgatatagtttttgacactatcttctgtcaattgattcttattcactatatct
aagaaacggatagcgtccctaggacgaactactgccattaatatctctattatagcttctggacataattcatctattata
ccagaattaatgggaactattccgtatctatctaacatagttttaagaaagtcagaatctaagacctgatgttcatatattg
gttcatacatgaaatgatctctattgatgatagtgactatttcattctctgaaaattggtaactcattctatatatgctttccttgtt
gatgaaggatagaatatactcaatagaatttgtaccaacaaactgttctcttatgaatcgtatatcatcatctgaaataat
catgtaaggcatacatttaacaattagagacttgtctcctgttatcaatatactattcttgtgataatttatgtgtgaggcaaa
tttgtccacgttctttaattttgttatagtagatatcaaatccaatggagctacagttcttggcttaaacagatatagtttttctg
gaacgaattctacaacattattataaaggactttgggtagataagtgggatgaaatcctattttaattaatgcgatagcctt
gtcctcgtgcagatatccaaacgcttttgtgatagtatggcattcattgtctagaaacgctctacgaatatctgtgacagat
atcatctttagagaatatactagtcgcgttaatagtactacaatttgtattttttaatctatctcaataaaaaaattaatatgtat
gattcaatgtataactaaactactaactgttattgataactagaatcagaatctaatgatgacgtaaccaagaagtttatc
tactgccaatttagctgcattatttttagcatctcgtttagattttccatctgccttatcgaatactcttccgtcgatatctacaca
ggcataaaatgtaggagagttactaggccccactgattcaatacgaaaagaccaatctctcttagttatttggcagtact
cattaataatggtgacagggttagcatctttccaatcaataatttttttagccggaataacatcatcaaaagacttatgatc
ctctctcattgatttttcgcgggatacatcatctattatggcgtcagccataacatcagcatccggcttatccgcctccgttgt
cataaaccaacgaggaggaatatcgtcggagctgtacaccatagcactacgttgaagatcgtacagagctttattaa
cttctcgcttctccatattaagttgtctagttagttgtgcagcagtagctccttcgattccaatgtttttaatagccgcacacac
aatctctgcgtcagaacgctcgtcaatatagatcttagacatttttagagagaactaacacaaccagcaataaaacta
atttattttatcatttttttattcatcatcctctggtggttcgtcgtttctatcgaatgtggatctgattaacccgtcatctataggtg
atgctggttctggagattctggaggagatggattattatctggaagaatctctgttatttccttgttttcatgtatcgattgcgtt
gtaacattaagattgcgaaatgctctaaatttgggaggcttaaagtgttgtttgcaatctctacacgcatgtctaactagtg
gaggttcgtcagcggctctagtttgaatcatcatcggcgtagtattcctacttttacagttaggacacggtgtattgtatttct
cgtcgagaacgttaaaataatcgttgtaactcacatcctttattttatctatattgtattctactcctttcttaatgcattttatacc
gaataagagatagcgaaggaattctttttcggtgccgctagtacccttaatcatatcacatagtgttttatattccaaatttgt
ggcaatagacggtttatttctatacgatagtttgtttctggaatcctttgagtattctataccaatattattctttgattcgaattta
gtttcttcgatattagattttgtattacctatattcttgatgtagtactttgatgatttttccatggcccattctattaagtcttccaag
ttggcatcatccacatattgtgatagtaattctcggatatcagtagcggctaccgccattgatgtttgttcattggatgagta
actactaatgtatacattttccatttataacacttatgtattaactttgttcatttatattttttcattattatgttgatattaacaaaa
gtgaatatatatgttaataattgtattgtggttatacggctacaatttcataatgagtggaagtcagtgtccgatgatcaatg
acgatagctttactctgaaaagaaagtatcaaatcgatagtgcggagtcaacaataaaaatggataagaagaggat
aaagtttcagaatagagccaaaatggtaaaagaaataaatcagacaataagagcagcacaaactcattacgaga
cattgaaactaggatacataaaatttaagagaatgattaggactactactctagaagatatagcaccatctattccaaa
taatcagaaaacttataaactattctcggacatttcagccatcggcaaagcatcacagaatccgagtaagatggtatat
gctctgctgctttacatgtttcccaatttgtttggagatgatcatagattcattcgttatagaatgcatccaatgagtaaaatc
aaacacaagatcttctctcctttcaaacttaatcttattagaatattagtggaagaaagattctataataatgaatgcagat
ctaataaatggagaataattggaacacaagttgataaaatgttgatagctgaatctgataaatatacaatagatgcaa
ggtataacctaaaacccatgtatagaatcaagggaaaatctgaagaagataccctctttatcaaacagatggtagaa
caatgtgtgacatcccaggaattggtggaaaaagtgttgaagatactgtttagagatttgttcaagagtggagaataca
aagcgtacagatacgatgatgatgtagaaaatggatttattggattggatacactaaaattaaacattgttcatgatata
gttgaaccatgtatgcctgttcgtaggccagtggctaagatactgtgtaaagaaatggtaaataaatactttgagaatcc
gctacatattattggtaaaaatcttcaagagtgcattgactttgttagtgaataggcatttcatctttctccaatactaattcaa
attgttaaattaataatggatagtataaatagttattagtgataaaatagtaaaaataattattagaataagagtgtagtat
catagataactctcttctataaaaatggattttattcgtagaaagtatcttatatacacagtagaaaataatatagatttttta
aaggatgatacattaagtaaagtaaacaattttaccctcaatcatgtactagctctcaagtatctagttagcaattttcctc
aacacgttattactaaggatgtattagctaataccaatttttttgttttcatacatatggtacgatgttgtaaagtgtacgaag
cggttttacgacacgcatttgatgcacccacgttgtacgttaaagcattgactaagaattatttatcgtttagtaacgcaat
acaatcgtacaaggaaaccgtgcataaactaacacaagatgaaaaatttttagaggttgccgaatacatggacgaa
ttaggagaacttataggcgtaaattatgacttagttcttaatccattatttcacggaggggaacccatcaaagatatgga
aatcatttttttaaaactgtttaagaaaacagacttcaaagttgttaaaaaattaagtgttataagattacttatttgggctta
cctaagcaagaaagatacaggcatagagtttgcggataatgatagacaagatatatacactctatttcaacaaactg
gtagaatagtccatagcaatctaacagaaacgtttagagattatatctttcccggagataagactagctattgggtgtgg
ttaaacgaaagtatagctaatgatgcggatattgttcttaatagacacgccattaccatgtatgataaaattcttagttatat
atactctgagataaaacaaggacgcgttaataaaaacatgcttaagttagtttatatctttgagcctgaaaaagatatca
gagaacttctgctagaaatcatatatgatattcctggagatatcctatctattattgatgcaaaaaacgacgattggaaa
aaatattttattagtttttataaagctaattttattaacggtaatacatttattagtgatagaacgtttaacgaggacttattcag
agttgttgttcaaatagatcccgaatatttcgataatgaacgaattatgtctttattctctacgagtgctgcggacattaaac
gatttgatgagttagatattaataacagttatatatctaatataatttatgaggtgaacgatatcacattagatacaatggat
gatatgaagaagtgtcaaatctttaacgaggatacgtcgtattatgttaaggaatacaatacatacctgtttttgcacgag
tcggatcccatggtcatagagaacggaatactaaagaaactgtcatctataaaatccaagagtagacggctgaactt
gtttagcaaaaacattttaaaatattatttagacggacaattggctcgtctaggtcttgtgttagatgattataaaggagact
tgttagttaaaatgataaaccatcttaagtctgtggaggatgtatccgcattcgttcgattttctacagataaaaaccctagt
attcttccatcgctaatcaaaactattttagctagttataatatttccatcatcgtcttatttcaaaggtttttgagagataatcta
tatcatgtagaagaattcttggataaaagcatccatctaaccaagacggataagaaatatatacttcaattgataagac
acggtagatcatagaacagaccaaatatattattaataatttgtatatacatagatataattatcacacatttttgataaatg
ggaactgctgcaacaattcagactcccaccaaattaatgaataaagaaaatgcagaaatgattttggaaaaaattgtt
gatcatatagttatgtatattagtgacgaatcaagtgattcagaaaataatcctgaatatattgattttcgtaacagatacg
aagactatagatctctcattataaaaagtgatcacgagtttgtaaagctatgtaaaaatcatgcagagaaaagttctcc
agaaacgcaacaaatgattatcaaacacatatacgaacaatatcttattccagtatctgaagtactattaaaacctata
atgtccatgggtgacataattacatataacggatgtaaagacaatgaatggatgctagaacaactctctaccctaaact
ttaacaatctccgcacatggaactcatgtagcataggcaatgtaacgcgtctgttttatacattttttagttatctgatgaaa
gataaactaaatatataagtataatcccattctaatactttaacctgatgtattacctgcatcttattagaatattaacctaac
taaaagacataacatagttgataaaaagcggtaggatataaatattatggctgccaccgttccgcgttttgacgacgtg
tacaaaaatgcacaaagaagaattctagatcaagaaacattttttagtagaggtctaagtagaccgttaatgaaaaac
acatatctatttgataattacgcgtatggatggataccagaaactgcaatttggagtagtagatacgcaaacttagatgc
aagtgactattatcccatttcgttgggattacttaaaaagttcgagtttctcatgtctctatataaaggtcctattcccgtatat
gaagaaaaagtaaatactgaattcattgctaatggatcgttctctggtagatacgtatcatatcttcgaaagttttctgccct
tccaacaaacgagtttattagttttttgttactgacttccattccaatctataatatcttgttctggtttaaaaatactcagtttgat
attactaaacacacattattcagatacgtctatacagataatgccaaacacctggcgttggctaggtatatgcatcaaa
caggagactataagcctttgtttagtcgtctcaaagagaattatatatttaccggtcccgttccaataagtatcaaagatat
agatcaccctaatcttagtagagcaagaagtccatccgattatgagacattagctaatattagtactatattgtactttacc
aagtatgatccggtattaatgtttttattgttttacgtacctgggtattcaattactacaaaaattactccagccgtagaatatc
taatggataaactgaatctaacaaagagcgacgtacaactgttgtaaattattttatgcttcgtaaaatgtaggttttgaac
caaacattctttcaaagaatgagatgcataaaactttattatccaatagattgactatttcggacgtcaatcgtttaaagta
aacttcgtaaaatattctttgatcactgccgagtttaaaacttctatcgataattgtttcatatgttttaatatttacaagttttttg
gtccatggtacattagccggacaaatatatgcaaaataatatcgttctccaagttctatagtttctggattatttttattatattc
agtaaccaaatacatattagggttatctgcggatttataatttgagtgatgcattcgactcaacataaataattctagagg
agacgatctactatcaaattcggatcgtaaatctgtttctaaagaacggagaatatctatacatacctgattagaattcat
ccgtccttcagacaacatctcagacagtctggtcttgtatgtcttaatcatattcttatgaaacttggaaacatctcttctagtt
tcactagtacctttattaattctctcaggtacagattttgaattcgacgatgctgagtatttcatcgttgtatatttcttcttcgatt
gcataatcagattcttatataccgcctcaaactctattttaaaattattaaacaatactctattattaatcagtcgttctaactc
tttcgctatttctatagacttatcgacatcttgactgtctatctctgtaaacacggagtcggtatctccatacacgctacgaa
aacgaaatctgtaatctataggcaacgatgttttcacaatcggattaatatctctatcgtccatataaaatggattacttaat
ggattggcaaaccgtaacataccgttagataactctgctccatttagtaccgattctagatacaagatcattctacgtcct
atggatgtgcaactcttagccgaagcgtatgagtatagagcactatttctaaatcccatcagaccatatactgagttggc
tactatcttgtacgtatattgcatggaatcatagatggccttttcagttgaactggtagcctgttttagcatctttttatatctggc
tctctctgccaaaaatgttcttaatagtctaggaatggttccttctatcgatctatcgaaaattgctatttcagagatgaggtt
cggtagtctaggttcacaatgaaccgtaatatatctaggaggtggatatttctgaagcaagagctgattatttatttcttctt
ccaatctattggtactaacaacgacaccgactaatgtttccggagatagatttccaaagatacacacattaggataca
gactgttataatcaaagattaatacattattactaaacattttttgttttggagcaaataccttaccgccttcataaggaaact
tttgttttgtttctgatctaactaagatagttttagtttccaacaatagctttaacagtggacccttgatgactgtactcgctctat
attcgaataccatggattgaggaagcacatatgttgacgcacccgcgtctgtttttgtttctactccataatactcccacaa
atactgacacaaacaagcatcatgaatacagtatctagccatatctaaagctatgtttagattataatccttatacatctg
agctaaatcaacgtcatcctttccgaaagataatttatatgtatcattaggtaaagtaggacatgatagtacgactttaaa
tccattttcccaaatatctttacgaattactttacatataatatcctcatcaacagtcacataattacctgtggttaaaaccttt
gcaaatgcagcggctttgcctttcgcgtccgtagtatcgtcaccgatgaacgtcatttctctaactcctctatttaatacttta
cccatgcaactgaacgcgttcttggatatagaatccaatttgtacgaatccaatttttcagatttttgaatgaatgaatatag
atcgaaaaatatagttccattattgttattaacgtgaaacgtagtattggccatgccgcctactcccttatgactagactga
tttctctcataaatacagagatgtacagcttcctttttgtccggagatctaaagataatcttctctcctgttaataactctagac
gattagtaatatatctcagatcaaagttatgtccgttaaaggtaacgacgtagtcgaacgttagttccaacaattgtttag
ctattcgtaacaaaactatttcagaacatagaactagttctcgttcgtaatccatttccattagtgactgtatcctcaaacat
cctctatcgacggcttcttgtatttcctgttccgttaacatctcttcattaatgagcgtaaacaataatcgtttaccacttaaat
cgatataacagtaacttgtatgcgagattgggttaataaatacagaaggaaacttcttatcgaagtgacactctatatct
agaaataagtacgatcttgggatatcgaatctaggtatttttttagcgaaacagttacgtggatcgtcacaatgataacat
ccattgttaatctttgtcaaatattgctcgtccaacgagtaacatccgtctggagatatcccgttagaaatataaaaccaa
ctaatattgagaaattcatccatggtggcattttgtatgctgcgtttctttggctcttctatcaaccacatatctgcgacggag
cattttctatctttaatatctagattataacttattgtctcgtcaatgtctatagttctcatctttcccaacggcctcgcattaaatg
gaggaggagacaatgactgatatatttcgtccgtaactacgtaataaaagtaatgaggaaatcgtataaatacggtct
cgccatttcgacatctggatttcagatataaaaatctgttttcaccgtgactttcaaaccaattaatgcaccgaacatccat
ttatagaatttagaaatatattttcatttaaatgaatcccaaacattggggaagagccgtatggaccattatttttatagtact
ttcgcaagcgggtttagacggcaacatagaagcgtgtaaacgaaaactatatactatagtcagcactcttccatgtcct
gcatgtagacggcacgcgactatcgctatagaggacaataatgtcatgtctagcgatgatctgaattatatttattatttttt
catcagattatttaacaatttggcatctgatcccaaatacgcgatcgatgtgacaaaggttaaccctttataaacttaacc
cattataaaacttatgattagtcacgactgaaataaccgcgtgattattttttggtataattctacacggcatggtttctgtaa
ctatgaattcaacccccgttacattagtgaaatctttaacaaacagcaagggttcgtcaaagacataaaactcattgttt
acaatcgaaatagaccccctatcacacttaaaataaaaaatatccttatcctttaccaccaaataaaattctgattggtc
aatgtgaatgtattcacttaacagttccacaaatttatttattaactccgaggcacatacatcgtcggtattttttatggcaaa
ctttactcttccagcatccgtttctaaaaaaatattaacgagttccatttatatcatccaatattattgaaatgacgttgatgg
acagatgatacaaataagaaggtacggtacctttgtccaccatctcctccaattcatgctctattttgtcattaactttaatgt
atgaaaacagtacgccacatgcttccatgacagtgtgtaacactttggatacaaaatgtttgacattagtataattgtcca
agactgtcaatctataatagatagtagctataatatattctatgatggtattgaagaagatgacaatcttggcatattgatc
atttaacacagacatggtatcaacagatagcttgaatgaaagagaatcagtaattggaataagcgtcttctcgataga
gtgtccgtataccaacatgtctgatattttgatgtattccattaaattatttagttttttctttttattctcgttaaacagcatttctgtc
aacggaccccaacatcgttgaccgattaagttttgattgatttttccgtgtaaggcgtatctagtcagatcgtatagcctat
ccaataatccatcatctgtgcgtagatcacatcgtacactttttaattctctatagaagagcgacagacagcaatttctttat
tctctacagatgtaagatacttgaagacattcctatgatgatgcagaattttggataacacggtattgatggtatctgttac
cataattcctttgatggctgatagtgtcagagcacaagatttccaatctttgttttgatatctatatcagacagcatggtgcgt
ctgacaacacaaggattaagacggaaagatgaaatgattctctcaacatcttcaatggataccttgctattttttctggca
ttatctatatgtgcgagaatatcctctagagaatcagtatcctttttgatgatagtggatctcaatgacatgggacgtctaa
accttcttattctatcaccagattgcatggtgatttgtcttctttcttttatcataatgtaatctctaaattcatcggcaaattgtct
atatctaaaatcataatatgagatgtttacctctacaaatatctgttcgtccaatgttagagtatctacatcagttttgtattcc
aaattaaacatggcaacggatttaattttatattcctctattaagtcctcgtcgataataacagaatgtagataatcatttaa
tccatcgtacatggttggaagatgcttgttgacaaaatctttaattgtcttgatgaaggtgggactatatctaacatcttgatt
aataaaatttataacattgtccataggatactttgtaactagttttatacacatctcttcatcggtaagtttagacagaatatc
gtgaacaggtggtatattatattcatcagatatacgaagaacaatgtccaaatctatattgtttaatatattatatagatgta
gcgtagctcctacaggaatatctttaactaagtcaatgatttcatcaaccgttagatctattttaaagttaatcatataggca
ttgatttttaaaaggtatgtagccttgactacattctcattaattaaccattccaagtcactgtgtgtaagaagattatattcta
tcataagcttgactacatttggtcccgataccattaaagaattcttatgatataaggaaacagattttaggtactcatctact
ctacaagaattttggagagccttaacgatatcagtgacgtttattatttcaggaggaaagaatctaacattgagaatatc
ggaattaatagcttccagatacagtgattttggcaatagtccgtgtaatccataatccagtaacacgagctggtgcttgct
agacaccttttcaatgtttaatttttttgaaataagctttgataaagccttcctcgcaaattccggatacatgaacatgtcgg
cgacatgattaagtattgttttttcattattttctcaacaagttctcaataccccaatagatgatagaatatcacccaatgcgt
ccatgttgtctatttccaacaggtcgctatatccaccaatagaagtttttccaaaaaagattctaggaacagttctaccac
cagtaatttgttcaaaatagtcacgcaattcattttcgggtttaaattctttaatatcgacaatttcatacgctcctcttttgaaa
ctaaacttatttagaatatccagtgcatttctacaaaaaggacatgtatacttgacaaaaattgtcactttgttattggccaa
cctttgttgtacaaattcctcggccattttaatatttaagtgatataaaactatctcgacttatttaactctttagtcgagatatat
ggacgcagatagctatatgatagccaactacagaaggcaaacgctataaaaaacataattacgacgagcatatttat
aaatatttttattcagcattacttgatatagtaatattaggcacagtcaaacattcaaccactctcgatacattaactctctc
attttctttaacaaattctacaatatcttcgtaaaaagattcttgaaactttttagaatatctatcgactctagatgaaatagc
gttcgtcaacatactatgttttgtatacataaaggcgcccattttaacagtttctagtgacaaaatgctagcgatcctagga
tcctttagaatcacatagattgacgattcgtctctcttagtaactctagtaaaataatcatacaatctagtacgcgaaataa
tattatccttgacttgaggagatctaaacaatctagttttgagaacatcgataagttcatcgggaatgacatacatactatc
tttaatagaactcttttcatccagttgaatggattcgtccttaaccaactgattaatgagatcttctattttatcattttccagatg
atatgtatgtccattaaagttaaattgtgtagcgcttctttttagtctagcagccaatactttaacatcactaatatcgatatac
aaaggagatgatttatctatggtattaagaattcgtttttcgacatctgtcaaaaccaattcctttttgcctgtatcatccagttt
tccatcctttgtaaagaaattattttctactagactattaataagactgataaggattcctccataattgcacaatccaaact
ttttaacaaaactagactttacaagatctacaggaatgcgtaattcaggtttcttagcttgtgattttttcttttgtggacattttc
ttgtgaccaactcatctaccatttcattgattttagcagtgaaataagctttcaatgcacgggcactgatactattgaaaac
gagttgatcttcaaattccgccatttaagttcaccaaacaacttttaaatacaaatatatcaatagtagtagaataagaac
tataaaaaaaataataattaaccaataccaaccccaacaaccggtattattagttgatgtgactgttttctcatcacttag
aacagatttaacaatttctataaagtctgtcaaatcatcttccggagaccccataaatacaccaaatatagcggcgtac
aacttatccatttatacattgaatattggcttttctttatcgctatcttcatcatattcatcatcaatatcaacaagtcccagatta
cgagccagatcttcttctacattttcagtcattgatacacgttcactatctccagagagtccgataacgttagccaccactt
ctctatcaatgattagtttcttgagtgcgaatgtaatttttgtttccgttccggatctatagaagacgataggtgtgataattgc
cttggccaattgtctttctcttttactgagtgattctagttcaccttctatagatctgagaatggatgattctccagtcgaaaca
tattctaccatggatccgtttaatttgttgatgaagatggattcatccttaaatgttttctctgtaatagtttccaccgaaagact
atgcaaagaatttggaatgcgttccttgtgcttaatgtttccatagacggcttctagaagttgatacaacataggactagc
cgcggtaacttttatttttagaaagtatccatcgcttctatcttgtttagatttatttttataaagtttagtctctccttccaacataa
taaaagtggaagtcatttgactagataaactatcagtaagttttatagagatagacgaacaattagcgtattgagaagc
atttagtgtaacgtattcgatacattttgcattagatttactaatcgattttgcatactctataacacccgcacaagtctgtag
agaatcgctagatgcagtaggtcttggtgaagtttcaactctcttcttgattaccttactcatgattaaacctaaataattgta
ctttgtaatataatgatatatattttcactttatctcatttgagaataaaaatgtttttgtttaaccactgcatgatgtacagatttc
ggaatcgcaaaccaccagtggttttattttatccttgtccaatgtgaattgaatgggagcggatgcgggtttcgtacgtag
atagtacattcccgtttttagaccgagactccatccgtaaaaatgcatactcgttagtttggaataactcggatctgctata
tggatattcatagattgactttgatcgatgaaggctcccctgtctgcagccatttttatgatcgtcttttgtggaatttcccaaa
tagttttataaactcgcttaatatcttctggaaggtttgtattctgaatggatccaccatctgccataatcctattcttgatctca
tcattccataattttctctcggttaaaactctaaggagatgcggattaactacttgaaattctccagacaatactctccgagt
gtaaatattactggtatacggttccaccgactcattatttcccaaaatttgagcagttgatgcagtcggcataggtgccac
caataaactatttctaagaccgtatgttctgattttatcttttagaggttcccaattccaaagatccgacggtacaacattcc
aaagatcatattgtagaataccgttactggcgtacgatcctacatatgtatcgtatggtccttccttctcagctagttcacaa
ctcgcctctaatgcaccgtaataaatggtttcgaagatcttcttatttagatcttgtgcttccaggctatcaaatggataattt
aagagaataaacgcgtccgctaatccttgaacaccaataccgataggtctatgtctcttattagagatttcagcttctgg
aataggataataattaatatctataattttattgagatttctgacaattactttgaccacatccttcagtttgagaaaatcaaa
tcgcccatctattacaaacatgttcaaggcaacagatgccagattacaaacggctacctcattagcatccgcatattgt
attatctcagtgcaaagattactacacttgatagttcctaaattttgttgattactctttttgttacacgcatccttataaagaat
gaatggagtaccagtttcaatctgagattctataatcgctttccagacgactcgagcctttattatagatttgtatctcctttct
ctttcgtatagtgtatacaatcgttcgaactcgtctccccaaacattgtccaatccaggacattcatccggacacatcaac
gaccactctccgtcatccttcactcgtttcataaagagatcaggaatccaaagagctataaatagatctctggttctatgtt
cctcgtttcctgtattctttttaagatcgaggaacgccataatatcagaatgccacggttccaagtatatggccataactcc
aggccgtttgtttcctccctgatctatgtatctagcggtgttattataaactctcaacattggaataataccgtttgatatacc
attggtaccggagatatagcttccactggcacgaatattactaattgatagacctattccccctgccattttagagattaat
gcgcatcgttttaacgtgtcatagataccctctatgctatcatcgatcatgttaagtagaaaacagctagacatttggtga
cgactagttcccgcattaaataaggtaggagaagcgtgcgtaaaccatttttcagaaagtagattgtacgtctcaatag
ctgagtctatatcccattgatgaattcctactgcgacacgcattaacatgtgctgaggtctttcaacgatcttgttgtttattttc
aacaagtaggatttttccaaagttttaaaaccaaaatagttgtatgaaaagtctcgttcgtaaataataaccgagttgagt
ttatccttatatttgttaactatatccatggtgatacttgaaataatcggagaatgtttcccatttttaggattaacatagttgaa
taaatcctccatcacttcactaaatagtttttttgtttccttgtgtagatttgatacggctattctggcggctagaatggcataat
ccggatgttgtgtagtacaagtggctgctatttcggctgccagagtgtccaattctaccgttgttactccattatatattccttg
aataaccttcatagctattttaataggatctatatgatccgtgtttaagccataacataattttctaatacgagacgtgatttt
atcaaacatgacattttccttgtatccatttcgtttaatgacaaacatttttgttggtgtaataaaaaaaattatttaacttttcat
taatagggatttgacgtatgtagcgtacaaaattatcgttcctggtatatagataaagagtcctatatatttgaaaatcgtta
cggctcgattaaactttaatgattgcatagtgaatatatcattaggatttaactccttgactatcatggcggcgccagaaat
taccatcaaaagcattaatacagttatgccgatcgcagttagaacggttatagcatccaccatttatatctaaaaattag
atcaaagaatatgtgacaaagtcctagttgtatactgagaattgacgaaacaatgtttcttacatattttttttttattagtaac
cgacttaatagtaggaactggaaaactagacttgattattctataagtatagatacccttccaaataatattctctttgata
aaagttccagaaaatgtagaattttttaaaaagttatcttttgctattaccaagattgtgtttagacgcttattattaatatgag
tgatgaaatccacaccgcctctagatatcgcttttatttccacattagatggtaaatccaatagtgaaactatctttttagga
atgtatggactcgcgtttagaggagtgaacgtcttaggcgtcggaaaggggccggcctttttttctagacactaaataaa
tagtaagattaaattaattataaaattatgtatataatattaattataaaattatgtatatgatttactaactttagttagataaa
ttaataatacataaattttagtatattaatattataaattaataatacataaattttagtatattaatattatattttaaatatttattt
agtgtctagaaaaaaaggcctagcaggcc

[0071] Any of the sequences of the sMVA fragments F1, F2, and F3 may contain one or more alterations or variations. For example, the sequence of sMVA fragment F1 (deposited at NCBI under Accession No. MW023923, www.ncbi.nlm.nih.gov/nuccore/MW023923.1/) contains 1 nucleotide alteration in a non-coding determining region downstream of open reading frame 021 (SEQ ID NO: 12):

ggcctagcaggccggcctttttttctagacactaaataaatagtaagattaaattaattataaaattat
gtatataatattaattataaaattatgtatatgatttactaactttagttagataaattaataatacataaattttagtatattaat
attataaattaataatacataaattttagtatattaatattatattttaaatatttatttagtgtctagaaaaaaatgtgtgacca
acgaccgtaggaaactctagagggtaagaaaaatcaatcgctttatagagaccatcagaaagaggtttaatatttttgt
gagaccatcgaaggagaaagagataaaacttttttacgactccatcagaaagaggtttaatatttttgtgagaccatcg
aagagagaaagagataaaacttttttacgactccatcagaaagaggtttaatatttttgtgagaccatcgaagagaga
aagagataaaacttttttacgactccatcagaaagaggtttaatatttttgtgagaccatcgaaggagaaagagataaa
acttttttacgactccatcagaaagaggtttaatatttttgtgagaccatcgaaggagaaagagataaaacttttttacga
ctccatcagaaagaggtttaatatttttgtgagaccatcgaaggagaaagagataaaacttttttacgactccatcaga
aagaggtttaatatttttgtgagaccatcgaagagagaaagagataaaacttttttacgactccatcagaaagaggttta
atatttttgtgagaccatcgaaggagaaagagataaaacttttttacgactccatcagaaagaggtttaatatttttgtgag
accatcgaagagagaaagagaataaaaatattttagtgacaccatcagaaagaggtttaatatttttgtgagaccatc
gaagagagaaagagataaaacttttttacgactccatcagaaagaggtttaatatttttgtgagaccatcgaaggaga
aagagataaaacttttttacgactccatcagaaagaggtttaatatttttgtgagaccatcgaagagagaaagagataa
aacttttttacgactccatcagaaagaggtttaatatttttgtgagaccatcgaagagagaaagagataaaacttttttac
gactccatcagaaagaccatcgaagagagaaagagaaagagatagttagtctagatatttttcttagtacaaaagtc
aatgttttaaaatatatggacaagaatttgtctgtataaaaacttgtgtgaaattttgtaccaaagaaaaaatgtgagcag
tatcccctacatggattttactagatcatttatataccaaaaaatattatacgatctacgttttattatatgattttaacgtgtaa
attataaacattattttatgatatacaattgtctggtaacctagatgggcataggggatgagtatatgttgttggacgttattg
tttaagaaatagttgatgcatcagaaagaggtttaatatttttgtgagaccatcgaagagagaaagagataaaactttttt
acgactccatcagaaagaggtttaatatttttgtgagaccatcgaagagagaaagagataaaacttttttatgactccat
tgaagagagaatgagaataaaaatattttagtgacaccatcagaaagaggtttaatattttttatgagaccatcaaaga
gagaaagagaataaaaatattttatgactccattgaagagagaaagagaaaatgagaataaaaatattttagtgaca
ccatcagaaagaggtttaatattttttatgagaccatcaaagagagaaagagaataaaaatatttttgtaaaacttttttta
tgagaccatcaaagagagaaagagaataaaaatatttttgtaaaactttttttatgagaccatcaaagagagaaaga
gaataaaaatatttttgtaaaactttttttatgagaccatcaaagagagaaagagaataaaaatatttttgtaaaacttttttt
atgagaccatcaaagagagaaagagaataaaaatatttttgtaaaactttttttatgagaccatcaaagagagaaag
agaataaaaatatttttgtaaaactttttttatgagaccatcaaagagagaaagagaataaaaatatttttgtaaaacttttt
ttatgagaccatcaaagagagaaagagaataaaaatattttatgactccattgaagagagaaagagaataaaaata
ttttagtgacaccatcagaaagaggtttaatatttttgtgagaccatcgaagagagaaagagaataaaaatattttatga
ctccattgaagagagaaagagaataaaaatattttagtgacaccatcagaaagaggtttaatattttttatgagaccatc
aaagagagaaagagaataaaaatatttttgtaaaactttttttatgagaccatcaaagagagaaagagaataaaaat
atttttgtaaaactttttttatgagaccatcaaagagagaaagagaataaaaatatttttgtaaaactttttttatgagaccat
caaagagagaaagagaataaaaatatttttgtaaaactttttttatgagaccatcaaagagagaaagagaataaaaa
tatttttgtaaaactttttttatgagaccatcaaagagagaaagagaataaaaatattttatgactccattgaagagagaa
tgagaataaaaatattttagtgacaccatcagaaagaggtttaatatttttgtgagaccatcgaagagagaaagagaa
taaaaatattttatgactccattgaagagagaaagagaataaaaatattttagtgacaccatcagaaagaggtttaata
ttttttatgagaccatcaaagagagaaagagaataaaaatatttttgtaaaactttttttatgagaccatcaaagagaga
aagagaataaaaatatttttgtaaaactttttttatgagaccatcaaagagagaaagagaataaaaatatttttgtaaaa
ctttttttatgagaccatcaaagagagaaagagaataaaaatatttttgtaaaactttttttatgagaccatcaaagagag
aaagagaataaaaatatttttgtaaaactttttttatgagaccatcaaagagagaaagagaataaaaatatttttgtaaa
actttttttatgagaccatcaaagagagaaagagaataaaaatatttttgtaaaactttttttatgagaccatcaaagaga
gaaagagaataaaaatattttatgactccattgaagagagaatgagaataaaaatattttagtgacaccatcagaaa
gaggtttaatatttttgtgagaccatcgaagagagaaagagaataaaaatattttatgactccattgaagagagaatga
gaataaaaatattttagtgacaccatcagaaagaggtttaatattttttatgagaccatcaaagagagaaagagaata
aaaatatttttgtaaaactttttttatgagaccatcaaagagagaaagagaataaaaatatttttgtaaaaattataaacat
tattttatgatatacaattgtctggtaacctagatgggcataggggatgttgataagctcgacgagtatatgttgttggacgt
tattgtttaagaaatagttgatgcatcagaaagagaataaaaaatattttagtgagaccatcgaagagagaaagagat
aaaacttttttacgactccatcagaaagaggtttaatatttttgtgagaccatcgaagagagaaagagataaaactttttt
acgactccatcagaaagaggtttaatatttttgtgagaccatcgaaggagaaagagataaaacttttttacgactccatc
agaaagaggtttaatatttttgtgagaccatcaaagagagaaagagaataaaaatatttttgtaaaactttttttatgaga
ccatcaaagagagaaagagaataaaaatatttttgtaaaactttttttatgagaccatcaaagagagaaagagaata
aaaatatttttgtaaaactttttttatgagaccatcaaagagagaaagagaataaaaatatttttgtaaaactttttttatgag
accatcaaagagagaaagagaataaaaatattttatgactccattgaagagagaatgagaataaaaatattttagtg
acaccatcagaaagaggtttaatatttttgtgagaccatcgaagagagaaagagaataaaaatattttatgactccatt
gaagagagaatgagaataaaaatattttagtgacaccatcagaaagaggtttaatattttttatgagaccatcaaaga
gagaaagagaataaaaatatttttgtaaaactttttttatgagaccatcaaagagagaaagagaataaaaatatttttgt
aaaactttttttatgagaccatcaaagagagaaagagaataaaaatatttttgtaaaactttttttatgagaccatcaaag
agagaaagagaataaaaatatttttgtaaaactttttttatgagaccatcaaagagagaaagagaataaaaatattttat
gactccattgaagagagaatgagaataaaaatattttagtgacaccatcagaaagaggtttaatatttttgtgagaccat
cgaagagagaaagagaataaaaatattttatgactccattgaagagagaaagagaataaaaatattttagtgacac
catcagaaagaggtttaatattttttatgagaccatcaaagagagaaagagaataaaaatatttttgtaaaactttttttat
gagaccatcaaagagagaaagagaataaaaatattttatgactccattgaagagagaatgagaataaaaatatttta
gtgacaccatcagaaagaggtttaatatttttgtgagaccatcgaagagagaaagagaataaaaatattttatgactcc
attgaagagagaatgagaataaaaatattttagtgacaccatcagaaagaggtttaatatttttgtgagaccatcgaag
agagaaagagaataaaaatattttatgactccattgaagagagaatgagaataaaaatattttagtgacaccatcag
aaagaggtttaatattttttatgagaccatcaaagagagaaagagaataaaaatatttttgtaaaactttttttatgagacc
atcaaagagagaaagagaataaaaatatttttgtaaaactttttttatgagaccatcaaagagagaaagagaataaa
aatatttttgtaaaactttttttatgagaccatcaaagagagaaagagaataaaaatatttttgtgagaccatcaaagag
agaaagagaataaaaatatttttgtgagaccatcaaagagagaaagagaataaaaatatttttgtgagaccatcaaa
gagagaaagagaataaaaatattttatgactccattgaagagagaaagagaataaaaatattttagtgacaccatca
gaaagaggtttaatatttttgtgagaccatcgaagagagaaagagaataaaaatattttatgactccattgaagagag
aaagagaataaaaatattttagtgacaccatcagaaagaggtttaatattttttatgagaccatcaaagagagaaaga
gaataaaaatattttttatgagaccatcaaagagagaaagagaataaaaatattttatgagaccatcaaagagagaa
agagaataaaaatattttttatgagaccatcaaagagagaaagagaataaaaatattttatgagaccatcaaagaga
gaaagagaataaaaatattttttatgagaccatcaaagagagaaagagaataaaaatatttttgtatgagaccatcag
aaagaggtttaatatttttgtgataccctgaaaggaaataggaatagtgtcataatcgtatcacactattgagacagaaa
aagaagaagtcgcgagaggtaactttttgttttgcaaaccggaatatagtgtccggtacacttttttaattcgtggtgtgcc
tgaatcgttcgattaaccctactcatccaatttcagatgaatagagttatcgattcagacacacgctttgagttttgttgaat
cgatgagtgaagtatcatcggttgcaccttcagatgccgatccgtcgacatacttgacctcaagttcagatgattccttgc
acatgtctccgatacgaacgctaaactctagattcttgacacattttgtatcgacgatcgttgaaccgatgatatcttcgta
actcactttcttatgagagatgttagacccgagtactggatgggtcttgatgtcgctgtctttctcttcttcgctacatctgatgt
cgatagacacctcacagtctttccatcagcggattctgagatggatttaatctgaggacatttggtgaatccaaagttcat
tctcagacctccaccgatgatggagtaataagtggtaggaggatctacatcctcgactgattccacctcgggatctgga
tctgactcggactctgtaatttccgttacggattggcaaatcttatcatcggtcggtgtttggtcttgctttgtgactttgataat
aacatcgattcccatatgatgtttgttttcttcttccgtacacgatgaggatgattgctgaagactggcaggcacatgcatg
ccagtacgatatattgtttcatgattgctattgattgagtactgttctttatgattctacttccttaccgtgcaataaattagaata
tattttctacttttacgagaaattaattattgtatttatgggtgaaaaacttactataaaaagcgggtgggtttggaattagtg
atcagtttatgtatatcgcaactaccgggcatatggctacattacccacatgataagagattgtatcagtttcgtagtcttg
agtattggtattactatatagtatatagatgtcgacgctagagttactgtctccgaatgcggcatgatagtatcattctttgct
ttcgttaactgtttggaggaagaatctttgttattgcatttaatctcgaaattcagagtgcacacctttctcctgtaaagaaac
ctgaagtcgctaccttattaagaagacgggatcgcagtctttatgattcatagtaatagttagttccgacgttgagatgga
ttcgctgagaccggtagtggtcgtccgagtacacgatgtgtcgttaactggatacaggttaatttccacatcgatatagtt
aaaggtatttctgggtacgggttcgcatttatctgcggaagagacggtgtgagaatatgttccgagaccacacggaga
acagatgacgtctccggatactccgtatcctattccacattttgtttgggaaacacatgccttgcatccatgatcgggaga
gcattcacagattctattgtgagtcgtgttacacgatcgcgtcgacattgttgacagaaacgtgaccttcattcttaccgtc
gtccataaatacgttaggtatgtaccacatactgtcgcgaacgatgcgtccatctcataatgatttactttttcataattaaa
gatgtgaaagaaaaccgaacaatatatttttttagtaatgtttatgcgagacatataaaataaactccgtgtttatgatgcc
ggtaaatgtttttatcatcttggacggaatcgattttgtaatatgccatggaaacaggacattatcactccatgataaattat
ttaatggagtcgatcctctcattgttctttgcgtatctcaatctgtggcgtttgcttcgtttaaataatatatcaaacatggaga
cgcctgatatgtaggcattcttcattctattaatgtctgctctatagcgctttagttccttatgacgaccggcgatatcatactt
actttagaaggaaaatcatcatctaggattaaggcgtatctgatacaggcgaataatggttcaggatatagatagcgta
tatctctattaaatgcgtcaatcatagtctctagagtgggatggtaactcagtaataaatcaactagcttctctttggtaact
gcttttctggatggccgtattgattatcgagcgtgacactcgctccatattccaataaccgctttgcaaattgtatattattga
catcgaccgcgtaatatagtagagttatcgatcatatctatatcatccatgtacttgcttagtatatcaaatacatcttcata
acagtgatacccgcaattattaaatctcgataatatcagaccgtacatacatagacggccattgttagatatgtgatttac
agccgcgtgtccatattttccacgataaaccttacgacgtttacatcgacgagattattattaacaaagttgttgtccgtcgt
cttatccaacatgcattgaatgataggtatacttaccatatcgccgtaatgtaagtagtttatcagtatggcttgtacgatgg
attcatcctgttgtctaaatctctttagaatgttatcgatgatgtagtggttatattctctggaatcgtacgaagtaatactacg
cattacgtcgacaagagtatgacgtctctcaataagaagattaacgatttccatgtctacattatatggggttactctaaat
cgcttgtttagataatacgcctctaatatagggctgacgtcgtatactctacacgtgtccacatcctttattaataatctctat
atctatggttgagcaagaccagtagtattggatggaaacattgttatcgatcaaacatttaattacatccttggatagaga
ttctctatgagacgatatatagtaatgaagagagttcttacacatatcactgttgtacatacaggtacgaaatacgtaacc
ggtgctgtaacattctgatttaagaagccatagcaatacttctggtctcggattaggcgtcgttacgtatatatccaccaat
ccgagaccattgattgcataattcgtattcttggacggacgtatccgtttatccacaattaggtattttagcagacgtaagt
cgaaatcatttatattcgacttgagttcgttagaggaattcgaatagctggatatcagtagatgcacaatctgagattttac
gtatctatgcttactgtatgctcctagcggagttaatccttcgttgtttctacaaagtctctcgactccgcgagagagtaaca
gtcgaacaatcttaatgtctgtatcgcatttattggagacgtaacaatgtagcgcattgtttcctcgtctatctatatgttttgat
aagttgtgacacgtttcaatttctagttttatttttttgtacgtcacatcttcatccagtagacgacatagaatacatgtgcaat
ccatagctattctggtgctaattattcctcataagatgataaaaagtgtagtgagagagcatgaaggagatttagtattta
gcagtgcggatatgatccaagagggtgagatagtcgttctcgttcagaatctttcgcagcataagtagtatgtcgatata
cttatcgttgaagactcttccagagacgatagctgattgagtacaaagtccaatgattgcacgaagttcttcggcggtttt
catggagtcatttctgatgaaacatttaatgatctaaatttcagtttatgtttgtaccccgtattcatacttaacaaattggtatt
acataccattaataatgcaagcataaaaaatcgttagtagatgtttctaaatataggttccgtaagcaaagaatataag
aatgaagcggtaatgataaaatcaatcgttatctaaaatgatcatactcatttattttattctattatattaacacatacattttt
aacagcaacacattcaatattgtattgttatttttatattatttacacaattaacaatatattattagtttatattactgaattaata
atataaaattcccaatcttgtcataaacacacactgagaaacagcataaacacaaaatccatcaaaaatgttgataa
attatctgatgttgttgttcgctgctatgataatcagatcattcgccgatagtggtaacgctatcgaaacgacatcgccag
aaattacaaacgctacaacagatattccagctatcagattatgcggtccagagggagatggatattgtttacacggtga
ctgtatccacgctagagatatcgacggtatgtattgtagatgctctcatggttatacaggcattagatgtcagcatgtagta
ttagtagactatcaacgttcagaaaaaccaaacactacaacgtcatatatcccatctcccggtattatgcttgtattagta
ggcattattattattacgtgttgtctattatctgtttataggttcactcgacgaactaaactacctatacaagatatggttgtgc
cataatttttataaattttttttatgagtatttttacaaaaatgtataaagtgtatgtcttatgtatatttataaaaatgctaaatatg
cgatgtatctatgttatttgtatttatctaaacaatacctctacctctagatattatacaaaaattttttatttcggcatattaaag
taaaatctagttaccttgaaaatgaatacagtgggtggttccgtatcaccagtaagaacataatagtcgaatacagtat
ccgattgagattttgcatacaatactagtctagaaagaaatttgtaatcatcttctgtgacgggagtccatatatctgtatca
tcgtcccatgctatattcctgttatcatcattagttaatgaaaataactctcgtgcttcagaaaagtcaaatattgtatccata
catacatctccaaaactatcgcttatacgtttatctttaacgatacctatacctagatggttatttactaacagacattttcca
gatctattgactataactcctatagtttccacatcaaccaagtaatgatcatctattgttatataacaataacataactctttt
ccgtttttatcagtatgtatatctatatcaacgtcgtcgttgtagtgaatagtagtcattgatctattatatgaaacggatatgt
ctagaacggcaattgttttacgtccagttaacactttcgttgatttaaagtctagagtctttgcaaacataatatccttatccg
actttatatttcctgtagggtggtataattttattttgcctccacatatcggtgtttccaaatatattactagacaatattccatat
agttattagttaagggtacccaattagaacacgtacgcttattatcatcatttggatcgtatttcataaaagttattgtactat
cgatgtcaacacattctacattttttaatcgtctatatagtatttttctgatattttctataatatcagaattgtcttccatcggaag
ttgtatactatcggaatcagttacatgtttaaataattctctgatgtcattccttatacaatcaaattcattattaaacagtttaa
tagtctgtagacctttatcgtcgtaaatatccattgtcttattagttacgcttatttttatgtgtttttacgttgctttattatattttata
agaatgattgtttgacgaatcacgagaactattaagacacattattaggtatatattataaaaaagtttttgattacgatgtt
ataagaggaaagaggacacattaacatcatacatcaattaactacattcttataacatcgtaatcaaaagaattgcaa
ttttgatgtataacaactgtcaatgggttatggaattgtatattacatattatacggtatgttggtaacgacaaataccgatc
ggtaattgtctgccggtgtaatagaattatatatatctatctattacaccggccttgtatacataataataagttgtggtagta
tgatctccatatttataatttaggactttgtattcagtttttttggaatcataaaaaataaaaaaaagttttactaatttaaaatt
atttacatttttttcactgtttagtcgcggatatggaattcgatcctgccaaaatcaatacatcatctatagatcatgtaacaa
tattacaatacatagatgaaccaaatgatataagactaacagtatgcattatcacaaaaataaatccacatttggctaa
tcaatttcgggcttggaaaaaacgtatcgccggaagggactatatgactaacttatctagagatacaggaatacaaca
atcaaaacttactgaaactgtcaaaaaaatagaaacatatatggtctatatatacactacaatttagttattaattggata
accgatgtgattatcaatcaatattaagaaggttggtaaattggtacatagctaataatacctatacacccaataataca
acaaccatttctgagttggatatcatcaaaatactggataaatacgaggacgtgtatagagtaagtaaagaaaaaga
atgtgaaatttgctatgaagttgtttactcaaaacgatagatactttggtttattggattcgtgtaatcatatattttgcataaca
tgcatcaatatatggcatagaacacgaagagaaaccggtgcgtcggataattgtcctatatgtcgtacccgttttagaa
acataacaatgagcaagttaactaataaataaaaagtttaatttgttgacgacgtatgtcgttattttttctcgtataaaaga
ttaatttgattctaatataatctttagtattggataaatatcaattcaaattaattccattagattatatcataaataaaaatagt
agcacgcactacttcagccaaatattcttttttgaaacgccatctatcgtagtgaggacacaagtgaacctataatgagc
aaatttattagtatcggttacatgaaggactttacgtagagtggtgattccactatctgtggtacgaacggtttcatcttcttt
gatgccatcacccagatgttctataaacttggtatcctttgccaaccaatacatatagctaaactcaggcatatgttccac
acatcctgaacaatgaaattctccagaagatgttacaatgtctagatttggacatttggtttcaaccgcgttaacatatga
gtgaacacacccatacatgaaagcgatgagaaataggattttcatcttgccaaaatatcactagaaaaaatttatttatc
aattttaaaggtataaaaaatacttattgttgctcgaatattttgtatttgatggtatacggaagattagaaatgtaggtattat
catcaactgattctatggttttatgtattctatcatgtttcactattgcgttggaaataatatcatatgcttccacatatattttatttt
gttttaactcataatactcacgtaattctggattattgacatatctatgaataattttagctccatgatcagtaaatattaatga
gaacatagtattaccacctaccattatttttttcatctcattcaattcttaattgcaaagatctatataatcattatagcgttgac
ttatggactctggaatcttagacgatgtacagtcatctataatcatggcatatttaatacattgttttatagcatagtcgttatc
tacgatgttagatatttctctcaatgaatcaatcacacaatctaatgtaggtttatgacataatagcattttcagcagttcaat
gtttttagattcgttgatggcaatggctatacatgtatatccgttatttgatctaatgttgacatctgaaccggattctagcagt
aaagatactagagattgtttattatatctaacagccttgtgaagaagtgtttctcctcgtttgtcaatcatgttaatgtctttaa
gataaggtaggcaaatgtttatagtactaagaattgggcaagcataagacatgtcacaaagaccctttttgtatgtataa
gtgtaaaaattataacattcatagttggatttacataggtgtccaatcgggatctctccatcatcgagataattgatggcat
ctcccttccttttttagtagatatttcatcgtgtaagaatcaatattaatatttctaaagtatccgtgtatagcctctttatttacca
cagttccatattccactagagggatatcgccgaatgtcatatactcaattagtatatgttggaggacatccgagttcattgt
tttcaatatcaaaaagatggtttccttatcatttctccatagtggtacaatactacacattattccgtgcggctttccattttcca
aaaacaatttgaccaaatctacatctttattgtatctataatcactatttagataatcagccataattactcgagtgcaacat
gttagatcgtctatatatgaataagccgtgttatctattcctttcattaacaatttaacgatgtctatatctatatgagatgactt
aatataatattgaagagctgtacaatagtttttatctataaaagacggcttgattccgtgattaattagacatttaacaactt
ccggacgcacatatgctctcgtatccgactctgaatacagatgagagatgatatacagatgcaatacggtaccgcaat
ttcgtagttgataatcatcatacgcgtatcagtactcgtcctcataaagaacactgcagccattttctatgaacaaatcaat
aatttcaggaacaggatcatctgtcattacataattttctataactgaacgatggttttcacatttaacactcaagtcaaatc
catgttctaccaacacctttatcaagtcaacgtctacatttttggatttcatatagctgaatatattaaagtcatttatgttgcta
aatccagtggcttctagtagagccatcgctatatcctttaactttaacatgtctactatttgtgtattcttctaatggggtagct
gtctccaatttttgcgtaatggattagtgccactgtctagtagtagtttgacgacctcgacattattacaatgctcattaaaa
aggtatgcgtgtaaagcattattcttgaattggttcctggtatcattaggatctctgtctctcaacatctgtttaagttcatcga
gagccacctcctcattttccaaatagtcaaacattttgactgaatgagctactgtgaactctatacacccacacaactaa
tgtcattaaatatcatgtcaaaaacttgtacaattattaataaaaataatttagtgtttaaattttaccagttccagattttaca
cctccgttaaccccactttttacaccactggacgatcctcctccccacattccaccgccaccagatgtataagttttagat
cctttattactaccatcatgtccatggataaagacactccacatgccgccactaccccctttagaagacatattaataag
acttaaggacaagtttaacaataaaattaatcacgagtaccctactaccaacctacactattatatgattatagtttctattt
ttacagtaccttaactaaagtctctagtcacaagagcaatactaccaacctacactattatatgattatagtttctatttttat
aggaacgcgtacgagaaaatcaaatgtctaatttctaacggtagtgttgataaacgattatcgtcaatggatacctcctc
tatcatgtcgtctattttcttactttgttctattaacttattagcattatatattatttgattataaaacttatattgcttattagcccaa
tctgtaaatatcggattattaacatatcgtttctttgtaggtttatttaacatgtacatcactgtaagcatgtccgtaccatttattt
taatttgacgcatatccgcaatttctttttcgcagtcggttataaattctatatatgatggatacatgctacatgtgtacttataa
tcgactaatatgaagtacttgatacatattttcagtaacgatttattattaccacctatgaataagtacctgtgatcgtctagg
taatcaactgttttcttaatacattcgatggttggtaatttactcagaataatttccaatatcttaatatataattctgctatttctg
ggatatatttatctgccagtataacacaaatagtaatacatgtaaacccatattttgttattatattaatgtctgcgccattatc
tattaaccattctactaggctgacactatgcgacttaatacaatgataaagtatactacatccatgtttatatcatcaatata
cggcttacaaagttttagtatcgataacacatccaactcacgcatagagaaggtagggaataatggcataatatttatt
aggttatcatcattgtcattatctacaactaagtttccattttttaaaatatactcgacaactttaggatctctattgccaaatttt
tgaaaatatttatttatatgcttaaatctatataatgtagctccttcatcaatcatacatttaataacattgatgtatactgtatg
ataagatacatattctaacaatagatcttgtatagaatctgtatatcttttaagaattgtggatattattacgtaaactattaca
caattctaaaatataaaacgtatcacggtcgaataatagttgatcaactatataattatcgattttgtgatttttcttcctaaa
ctgtttacgtaaatagttagatagaatattcattagttcatgaccactatagttactatcgaataacgcgtcaaatatttccc
gtttaatatcgcatttgtcaagataataatagagtgtggtatgttcacgataagtataataacgcatctctttttcgtgtgaaa
ttaaatagtttattacgtccaaagatgtagcataaccatcttgtgacctagtaataatataataatagagaactgttttacc
cattctatcatcataatcagtggtgtagtcgtaatcgtaattgtctaattcatcatcccaattataatattcaccagcacgtct
aatctgttctattttgatcttgtatccatactgtatgttgctacatgtaggtattcctttatccaataatagtttaaacacatctac
attgggatttgatgttgtagcgtatttttctacaatattaataccatttttgatactatttatttctatacctttcgaaattagtaattt
caataagtctatatcgatgttatcagaacatagatattcgagtatatcaaaatcattgatatttttatagtcgactgacgac
aataacaaaatcacaacatcgtttttgatattattatttttcttggtaacgtatgcctttaatggagtttcaccatcatactcata
taatggatttgcaccactttctatcaatgattgtgcactgctggcatcgatgttaaatgttttacaactatcatagagtatctta
tcgttaaccatgattggttgttgatgctatcgcattttttggtttctttcatttcagttatgtatggatttagcacgtttgggaagca
tgagctcatatgatttcagtactgtagtgtcagtactattagtttcaataagatcaatctctagatctatagaatcaaaacac
gataggtcagaagataatgaatatctgtaggcttcttgttgtactgtaacttctcgttttgttagatgtttgcatcgtgctttaac
atcaatggtacaaattttatcctcgctttgtgtatcatattcgtccctactataaaattgtatattcagattatcatgagatgtgt
atacgctaacggtatcaataaacggagcacaccatttagtcataaccgtaatccaaaaatttttaaagtatatcttaacg
aaagaagttgtgtcattgtctacggtgtatggtactagatcctcataagtgtatatatctagagtaatgtttaatttatcaaat
ggttgataatatggatcctcatgacaatttccgaagatggaaatgagatatagacatgcaataaatctaattgcggaca
tggttactccttaaaaaaatacgaataatcaccttggctatttagtaagtgtcatttaacactatactcatattaatccatgg
actcataatctctatacgggattaacggatgttctatatacggggatgagtagttttcttctttaactttatactttttactaatca
tatttagactgatgtatgggtaatagtgtttaaagagttcgttctcatcatcagaataaatcaatatctctgtttttttgttataca
gatgtattacagcctcatatattacgtaatagaacgtgtcatctaccttattaactttcaccgcatagttgtttgcaaatacg
gttaatcctttgacctcgtcgatttccgaccaatctgggcgtataatgaatctaaactttaatttcttgtaatcattcgaaata
atttttagtttgcatccgtagttatcccctttatgtaactgtaaatttctcaacgcgatatctccattaataatgatgtcgaattc
gtgctgtatacccatactgaatggatgaacgaataccgacggcgttaatagtaatttactttttcatctttacatattgggta
ctagttttactatcataagtttataaattccacaagctactatggaataagccaaccatcttagtataacacacatgtctta
aagtttattaattaattacatgttgttttatatatcgctacgaatttaaacagagaaatcagtttaggaaaaaaaaatatcta
tctacatcatcacgtctctgtattctacgatagagtgctactttaagatgagacatatccgtgtcatcaaaaatatactccat
taaaatgattattccggcagcgaacttgatattggatatatcacaacctttgttaatatctacgacaatagacagcagtcc
catggttccataaacagtgagtttatctttctttgaagagatattttgtagagatcttataaaactgtcgaatgacatcgcatt
tatatctttagctaaatcgtatatgttaccatcgtaatatctaaccgcgtctatcttaaacgtttccatcgctttaaagacgtttc
cgatagatggtctcatttcatcagtcatactgagccaacaaatataatcgtgtataacatctttgatagaatcagactcta
aagaaaacgaatcggctttattatacgcattcatgataaacttaatgaaaaatgtttttcgttgtttaagttggatgaatagt
atgtcttaataattgttattatttcattaattaatatttagtaacgagtacactctataaaaacgagaatgacataactagttat
caaagtgtctaggacgcgtaattttcatatggtatagatcctgtaagcattgtctgtattctggagctattttctctatatctaat
ttctgaacgttcaccaatgtctctagccactttggcactaatagcgatcattcgcttagcgtcttctatattattaactggttga
ttcaatctatctagcaatggaccgtcggacagcgtcattctcatgttcttaatcaatgtacatacatcgccgtcatctacca
attcatccaacaacataagctttttaaaatcatcattataataggtttgatcgttgtcatttctccaaagaatatatctaataa
gtagagtcctcatgattagttaacaactattttttatgttaaatcaattagtacaccgctatgtttaatacttattcatattttagtt
tttaggattgagaatcaatacaaaaattaatgcatcattaattttagaaatacttagtttccacgtagtcaatgaaacatttg
aactcatcgtacaggacgttctcgtacaggacgtaactataaaccggtttatatttgttcaagatagatacaaatccgat
aactttttttacgaattctacgggatccactttaaaagtgtcataccgggttctttttatttttttaaacagattaatggtgtgatg
ttgattaggtcttttacgaatttgatatagaatagcgtttacatattctccataatggtcaatcgccatttgttcgtatgtcataa
attctttaattatatgacactgtgtattatttagttcatccttgttcatcattaggaatctatccaatatggcaattatactagaac
tataggtgcgttgtatacacatattgatgtgtctgtttatacaatccatgctactaccttcgggtaaaattgtagcatcatata
ccatttctagtactttaggttcattgttatccattgcagaggacgtcatgaacgcatcctaaaaaaatatattatttttatgttat
tttgttaaaaataatcatcgaatacgaatcatccagtccactgaatagcaaaatctttactattttggtatcttccaatgtgg
ctgcctgatgtaatggaaattcattctctagaagatttttcaatgctccagcgttcaacaacgtacatactagacgcacgtt
attatcagctattgcataatacaaggcactatgtccatggacatccgccttaaatgcatctttgctagagagaaagctttt
cagctgcttagacttccaagtattaattcgtgacagatccatgtctgaaacgagacgctaattagtgtataatttttgtcata
ttgcaccagaattaataatatctctaatagatctgattagtagatacatggctatcgcaaaacaacatatacacatttaat
aaaaataatatttattaagaaaattcagatttcacgtacccatcaatataaataaaataatgattccttacaccgtaccca
tattaaggagattctaccttacccataaacaatataaatccagtaatatcatgtctgatgatgaacacaaatggtgtatta
aattccagtttttcaggagatgatctcgccgtagctaccataatagtagatgcctctgctacagttccttgttcgtcgacatc
tatctttgcattctgaaacattttataaatatataatgggtccctagtcatatgtttaaacgacgcattatctggattaaacat
actaggagccatcatttcggctatcgacttaatatccctcttattttcgatagaaaatttagggagtttaagattgtacacttt
attccctaattgaaacgaccaatagtctaattttgcagccgtaatagaatctgtgaaatgggtcatattatcacctattgcc
aggtacatactaatattagcatccttatacggaaggcgtaccatgtcatattctttgtcatcgattgtgattgtatttccttgca
atttagtaactacgttcatcatgggaaccgttttcgtaccgtacttattagtaaaactagcattgcgtgttttagtgatatcaa
acggatattgccatatacctttaaaatatatagtattaatgattgcccatagagtattattgtcgagcatattagaatctact
acattagacataccggatctacgttctactatagaattaattttattaaccgcatctcgtctaaagtttaatctatataggcc
gaatctatgatattgttgataatacgacggtttaatacacacagtattatctacgaaactttgataagttagatcagtgtac
gtatatttagatgttttcagcttagctaatcctgatattaattctgtaaatgctggacccagatctctttttctcaaatccatagt
cttcaataattctattctagtattacctgatgcaggcaatagcgacataaacatagaaaacgaataaccaaacggtga
gaagacaatattatcatcttgaatatttttatacgctactataccggcattggtaaatccttgtagacgataggtagacgct
gaacacgttaacgatagtatcaataacgcaatcatgattttatggtattaataattaaccttatttttatgttcggtataaaaa
ttattgatgtctacacatccttttgtaattgacatctatatatccttttgtataatcaactctaatcactttaacttttacagttttccc
taccagtttatccctatattcaacatatctatccatatgcatcttaacactctctgccaagatagcttcagagtgaggatagt
caaaaagataaatatatagagcataatcattctcgtatactctgccctttattacatcgcccgcattgggcaacgaataa
caaaatgcaagcatcttgttaacgggctcgtaaattgggataaaaattatgtttttatatctattttattcaagagaatattca
ggaatttctttttccggttgtatctcatcgcagtatatatcatttgtacattgtttcatattttttaatagtttacaccttttagtagga
ctagtatcgtacaattcatagctgtattttgaattccaatcacgcataaaaatatcttctaattgttgacgaagacctaatcc
atcatccggtgtaatattaatagatgctccacatgtatccgtaaagtaatttcctgtccaatttgaggtacctatataggcc
gttttatcggttaccatatatttggcatggtttaccctagaatacggaatgggaggatcagcatctggtacaataaatagc
tttacttctatatttatgtttttagattttagcatagcgatagatcttaaaaagtttctcatgataaacgaagatcgttgccagc
aactaatcaatagcttaacggatacttgtctgtctatagcggatcttcttaattcatcttctatataaggccaaaacaaaatt
ttacccgccttcgaataaataatagggataaagttcataacagatacataaacgaatttactcgcatttctaatacatga
caataaagcggttaaatcattggttctttccatagtacatagttgttgcggtgcagaagcaataaatacagagtgtggaa
caccacttacgttaatactaagaggatgatctgtattataatacgacggataaaagtttttccaattatatggtagattgtta
actccaagataccagtatacctcaaaaatttgagtgagatccgctgccaagttcctattattgaagatcgcaataccca
attctttgacctgagttagtgatctccaatccatgttagcgcttcctaaataaatatgtgtattatcagatatccaaaattttgt
atgaagaactcctcctaggatatttgtaatatctatgtatcgtacttcaactccggccatttgtagtctttcaacatcctttaat
ggtttgttagatttattgacggctactctaactcgtactcctcttttgggtaattgtacaatctcgtttaatattatcgtgccgaa
attcgtacccacttcatccgataaactccaataaaaagatgatatatctagtgtttttgtggtattggatagaatttccctcc
acatgttaaatgtagacaaatatactttatcaaattgcatacctataggaatagtctctgtaatcactgcgattgtattatcc
ggattcattttatttgttaaaagaataatcctatatcacttcactctattaaaaatccaagtttctatttctttcatgactgatttttt
aacttcatccgtttccttatgaagatgatgtttggcaccttcataaatttttatttctctattacaatttgcatgttgcatgaaata
atatgcacctaaaacatcgctaatctcattgtttgttccctggagtatgagagtcggggtgttaatcttggaaattatttttcta
accttgttggtagccttcaagacctgactagcaaatccagccttaattttttcatgattgattaatgggtcgtattggtatttat
aaactttatccatatctctagatactgattctggacatagctttccgactggcgcatttggtgtgatggttcccataagtttgg
cagctagcagattcagtcttgaaacagcatctgcattaactagaggagacattagaatcattgctgtaaacaagtttgg
attatcgtaagaggctagtatagaaattgttgctcccatggaatgacccaataagtagatttaatagttaccacgtgctgt
accaaagtcatcaatcatcattttttcaccattacttcttccatgtccaatatgatcatgtgagaatactaaaattcctaacg
atgatatgttttcagctagttcgtcataacgtccagaatgtttaccagctccatgacttatgaatactaatgccttaggatat
gtaatcattgtccagattgaacatacagtttgcactcatgattcacgttatataactatcaatattaacagttcgtttgatgat
catattatttttatgttttattgataattgtaaaaacatacaattaaatcaatatagaggaaggagacggctactgtcttttgt
gagatagtcatggcgactaaattagattatgaggatgctgttttttactttgtggatgatgataaaatatgtagtcgcgactc
catcatcgatctaatagatgaatatattacgtggagaaatcatgttatagtgtttaacaaagatattaccagttgtggaag
actgtacaaggaattgatgaagttcgatgatgtcgctatacggtactatggtattgataaaattaatgagattgtcgaagc
tatgagcgaaggagaccactacatcaattttacaaaagtccatgatcaggaaagtttattcgctaccataggaatatgt
gctaaaatcactgaacattggggatacaaaaagatttcagaatctagattccaatcattgggaaacattacagatctg
atgaccgacgataatataaacatcttgatactttttctagaaaaaaaattgaattgatgatataggggtcttcataacgca
taattattacgttagcattctatatccgtgttaaaaaaaattatcctatcatgtatttgagagttttatatgtagcaaacatgat
agctgtgatgccaataagctttagatattcacgcgtgctagtgttagggatggtattatctggtggtgaaatgtccgttatat
aatctacaaaacaatcatcgcatatagtatgcgatagtagagtaaacatttttatagtttttactggattcatacatcgtcta
cccaattcggttatgaatgaaattgtcgccaatcttacacccaaccccttgttatccattagtatagtattaacttcgttattta
tgtcataaactgtaaatgattttgtagatgccatatcatacatgatattcatgtccctattataatcattactaactttatcaca
atatatgttgataatatctatatatgatctagtctttgtgggcaactgtctatacaagtcgtctaaacgttgtttactcatatagt
atcgaacagccatcattacatggtcccgttccgttgatagataatcgagtatgttagtggacttgtcaaatctatataccat
attttctggaagtggatatacatagtcgtgatcaacattattgctagcctcatcttctatatcctgtactataccatctacata
atctacgatattattacacataaacatcgacaacatactattgtttattatctaagtcctgttgatccaaacccttgatctcct
ctatttgtactatctagagattgtacttcttccagttctggataatatatacgttgatagattagctgagctattctatctccagt
atttacattaaacgtacattttccattattaataagaatgactcctatgtttcccctataatcttcgtctattacaccacctccta
tatcaatgccttttagtgacagaccagacctaggagctattctaccatagcaaatcttaggcatggacatactaatatct
gtcttaattaactgtctttctcctggagggatagtataatcgtaagcgctatacaaatcatatccggcagcacccggcgat
tgcctagtaggagatttagctctgttagtttccttaacaaatctaactggtgagttaatattcatgttgaacataaaactaat
attttatttcaaaattatttaccatcccatatattccatgaataagtgtgatgattgtacacttctatagtatctatatacgattca
cgataaaatcctcctatcaatagcagtttattatccactatgatcaattctggattatccctcggataaataggatcatctat
cagagtccatgtattgctggattcacaataaaattccgcatttctaccaaccaagaataaccttctaccgaacactaac
gcgcatgatttataatgaggataataagtggatggtccaaactgccactgatcatgattgggtagcaaatattctgtagtt
gtatcagtttcagaatgtcctcccattacgtatataacattgtttatggatgccactgctggattacatctaggtttcagaag
actcggcatattaacccaagcagcatccccgtggaaccaacgctcaacagatgtgggatttggtagacctcctactac
gtataatttattgttagcgggtatcccgctagcatacagtctggggctattcatcggaggaattggaatccaattgtttgat
atataatttacagctatagcattgttatgtatttcattgttcatccatccaccgatgagatatactacttctccaacatgagta
cttgtacacatatggaatatatctataatttgatccatgttcataggatactctatgaatggatacttgtatgatttgcgtggtt
gtttatcacaatgaaatattttggtacagtctagtatccattttacattatttatacctctgggagaaagataatttgacctgat
tacatttttgataaggagtagcagatttcctaatttatttcttcgctttatataccacttaatgacaaaatcctcatctggaaca
tttagttcatcgctttctagaataagtttcatagatagataatcaaaattgtctatgatgtcatcttccagttccaaaaagtgtt
tggcaataaagtttttagtatgacataagagattggatagtccgtattctatacccatcatgtaacactcgacacaatattc
ctttctaaaatctcgtaggataaagtttatacaagtgtagatgataaattctacagaggttaatatagaagcacgtaataa
attgacgacgttatgactatctatatatacctttccagtatatgagtaaataactatagaagttagactgtgaatgtcaagg
tctagacaaaccctcgtaactggatctttatttttcgtgtatttttgacgtaaatgtgtgcgaaagtaaggagataactttttc
aatatcgtagaattgactattatattgcctcctatggcatcaataattgttttgaatttcttagtcatagacaatgctaatatatt
cttacagtacacagtattgacaaatatcggcatttatgtttctttaaaagtcaacatctaaagaaaaatgattatcttcttga
gacataactcccattttttggtattcacccacacgtttttcgaaaaaattagttttaccttctaatgatatattttccatgaaatc
aaacggattggtaacattataaatttttttaaatcccaattcagaaatcaatctatccgcgacgaattctatatatgttttcat
catttcacaattcattcctataagtttaactggaagagccgcagtaagaaattcttgttcaatggataccgcatctgttata
atagatctaacggtttcttcactcggtggatgcaataaatgtttaaacatcaaacatgcgaagtcgcagtgtagaccctc
gtctctactaatcaattcgttggaaaacgtgagtccgggcattaggccacgctttttaagccaaaatatggaagcgaat
gatccggaaaagaagattccttctactgcagcaaaggcaataagtctctctccataaccggcgctgtcatgtatccact
tttgagcccaatcggccttcttttttacacaaggcatcgtttctatggcattaaagagatagtttttttcattactatctttaacat
aagtatcgatcaaaagactatacatttccgaatgaatgttttcaatggccatctgaaatccgtagaaacatctagcctcg
gtaatctgtacttctgtacaaaatcgttccgccaaattttcattcactattccgtcactggctgcaaaaaacgccaatacat
gttttataaaatatttttcgtctggtgttagtttattccaatcattgatatctttagatatatctacttcttccactgtccaaaatgat
gcctctgcctttttatacatgttccagatgtcatgatattggattgggaaaataacaaatctatttggatttggtgcaaggat
gggttccataactaaattaacaataacaataaattttttttcagttatctatatgcctgtacttggatcttttgtacatcgatatc
gccgcaatcactacaataattacaagtattattgatagcattgttattagtactatcataattaaattatcgttattatcattttg
taattgtgacatcatactagataaatcgtttgcgagattgttgtgggaagcgggcatggaggatgaattatcgttattatta
tttaaagcctcccattcggattcacaaatatggcgcgcgttcaacattttatggaaacagataacaagaaaactcgtca
tcgttcaaatttttaacgatagtaaaccgattaaacgtcgagctaatttctaacgctagcgactctgttggatatgggtttcc
agatatatatcttttcagttcccctacgtatctataatcatctgtaggaaatggaagatatttccatttatctactgttcctaata
tcatatgtggtggtgtagtagaaccattaagcgcgaaagatgttatttcgcatcgtattttaacttcgcaataatttctggtta
gataacgcactctaccagtcaagtcaatgatattagcctttacagatatattcatagtagtcgtaacgatgactccatcttt
tagatgcgatactcctttgtatgtaccagaatcttcgtacctcaaactcgatatatttaaacaagttaatgagatattaacg
cgttttatgaatgatgatatataaccagaagttttatcctcggtggctagcgctataaccttatcattataataccaactagt
gtgattaatatgtgacacgttagtgtgggtacaaatatgtacattatcgtctacgtcgtattcgatacatccgcatacagcc
aacaaatataaaatgacaaatactctaacgccgttcgtacccatcttgatgcggtttaataaatgttttgatttcaatttattg
taaaaaaagattcggttttatactgttcgatattctcattgcttatattttcatctatcatctccacacagtcaaatccgtggtta
gcatgcacctcatcaaccggtaaaagactatcggactcttctatcattataactctagaatatttaatttggtcattattaat
caagtcaattatcttatttttaacaaacgtgagtattttactcattttttataaaaacttttagaaatatacagactctatcgtgt
gtctatatcttctttttatatccaatgtatttatgtctgatttttcttcatttatcatatataatggtccaaattctacacgtgcttcgg
attcatccagatcattaaggttcttataattgtaacatccttctcttccctcttctacatcttccttcttattcttattcttagcgtcac
agaatctaccacagcaggatcccatgacgagcgtcatattaaactaatccattttcaattataatatacgattagtaatg
accattaaaataaaaatattcttcataaccggcaagaaagtgaaaagttcacattgaaactatgtcagtagtatacatc
atgaaatgatgatatatatatactctattttggtggaggattatatgatataattcgtggataatcattcttaagacacatttct
tcattcgtaaatcttttcacgttaaatgagtgtccatattttgcaatttcttcatatgatggcggtgtacgtggacgaggctgct
cctgttcttgttgtagtcgccgactgtcgtgtctgcgtttagatccctccattatcgcgattgcgtagatggagtactattttata
ccttgtaattaaatttttttattaattaaacgtataaaaacgttccgtatctgtatttaagagccagatttcgtctaatagaaca
aatagctacagtaaaaataactagaataattgctacacccactagaaaccacggatcgtaatacggcaatcggttttc
gataataggtggaacgtatattttatttaaggacttaacaattgtctgtaaaccacaatttgcttccgcggatcctgtattaa
ctatctgtaaaagcatatgttgaccgggcggagccgaacattctccgatatccaatttctgtatatctataatattattaac
ctccgcatacgcattacagttcttttctagcttggataccgcactaggtacatcgtctagatctattcctatttcctcagcgat
agctcttctatccttttccggaagcaatgaaatcacttcaataaatgattcaaccatgagtgtgaaactaagtcgagaatt
actcatgcatttgttagttattcggagcgcgcaatttttaaactgtcctataacctctcctatatgaatagcacaagtgacat
tagtagggatagaatgttgagctaatttttgtaaataactatctataaaaagattatacaaagttttaaactctttagtttccg
ccatttatccagtctgagaaaatgtctctcataataaatttttccaagaaactaattgggtgaagaatggaaacctttaatc
tatatttatcacagtctgttttggtacacatgatgaattcttccaatgccgtactaaattcgatatctttttcgatttctggatatgt
ttttaataaagtatgaacaaagaaatggaaatcgtaataccagttatgtttaactttgaaattgttttttattttcttgttaatgat
tccagccacttgggaaaagtcaaagtcgtttaatgccgatttaatacgttcattaaaaacaaactttttatcctttagatga
attattattggttcattggaatcaaaaagtaagatattatcgggtttaagatctgcgtgtaaaaagttgtcgcagcatggta
gttcgtaaattttaatgtataacagagccatctgtaaaaagataaactttatgtattgtaccaaagatttaaatcctaatttg
atagctagctcggtatctactttatctgccgaatacagtgctaggggaaaaattataatatttcctctttcgtattcgtagtta
gttctcttttcatgttcgaaaaagtgaaacatgcggttaaaatagtttataacattaatattactgttaataactgccggata
aaagtgggatagtaatttcacgaatttgatactgtcctttctctcgttaaacgcctttaaaaaaactttagaagaatatctca
atgatagttcctgaccatccatagtttgtatcaataatagcaacatatgaagaacacgtttatacagagtatgtaaaaat
gttaatttatagtttaatcccatggcccacgcacacacgattaattttttttcatctccctttagattgttgtatagaaatttgggt
actgtgaactccgccgtagtttccatgggactatataattttgtggcctcgaatacaaattttactacatagttatctatctta
aagactataccatatcctcctgtagatatgtgataaaaatcgtcgtttataggataaaatcgtttatccttttgttggaaaaa
ggatgaattaatgtaatcattctcttctatctttagtagtgtttccttattaaaattcttaaaataatttaacaatctaactgatgg
agcccaattttggtgtaaatctaattgggacattatattgttaaaatacaaacagtctcctaatataacagtatctgataat
ctatggggagacatccattgatattcaggggatgaatcattggcaacacccatttattgtacaaaaagccccaatttac
aaacgaaagtccaggtttgatagagacaaactattaactattttgtctctgtttttaatttctttggtaatgaaattattcacaa
tatcagtatcttctttatctaccagagattttactaacttgataaccttggctgtctcattcaatagggtagtaatatttgtatgtg
tgatattgatatcttttagaagtgattctttgatggtgccagcatacgaattacaataatgcagaaactcggttaacatgca
ggaattatagtaagccaattccaattgttgcctgtgttgtattagagtgtcaatatgagcaatggtgtccttgcgtttctctga
tagaatgcgagcagcgattttggcgttatcatttgacgatatttctggaatgacgaatcctgtttctactaactttttggtagg
acaaagtgaaacaatcaagaagatagcttctcctcctatttgtggaagaaattgaactcctctagatgatctccttgaca
gatattggaccgaattacagaagtacctggaatgtaaagccctgaaaccccctcattttttaagcagattgttgccgtaa
atcctgcactatgcccaagatagagagctcctttggtgaatccatctctatgtttcagtttaaccaagaaacagtcagctg
gtctaaaatttccatctctatctaatacagcatctaacttgatgtcaggaactatgaccggttatgttatatgtaacattgagt
aaatccttaagttcataatcatcactgtcatcagttatgtacgatccaaacaatgtttctactggcatagtggatacgaag
atgctatccatcagaatgtttccctgattagtattttctatatagctattcttctttaaacgattttccaaatcagtaactatgttc
atttttttaggagtaggacgcctagccagtatggaagaggattttctagatcctctcttcaacatctttgatctcaatggaat
gcaaaaccccatagtgtaacaaccaacgataaaaataatattgtttttcactttttataattttaccatctgactcatggatt
cattaatatctttataagagctactaacgtataattctttataactgaactgagatatatacaccggatctatggtttccataa
ttgagtaaatgaatgctcggcaataactaatggcaaatgtataaaacaacgaaattatactagagttgttaaagttaat
attttctatgagctgttccaataaattatttgttgtaactgcgttcaagtcataaatcatcttgatactatccagtaaaccgttttt
aagttctggaatattattatcccattgtaaagcccctaattcgactatcgaatatcctgctctgatagcagtttcaatatcga
cggacgtcaatactgtaataaaggtggtagtattgtcatcatcgtgataaactactggaatatggtcgttagtaggtacg
gtaactttacacaacgcgatatataactttccttttgtaccatttttaacgtagttgggacgtcctgcagggtattgttttgaag
aaatgatatcgagaacagatttgatacgatatttgttggattcctgattatttactataatataatctagacagatagatgat
tcgataaatagagaaggtatatcgttggtaggataatacatccccattccagtattctcggatactctattaatgacacta
gttaagaacatgtcttctattctagaaaacgaaaacatcctacatggactcattaaaacttctaacgctcctgattgtgtct
cgaatgcctcgtacaaggatttcaaggatgccatagattctttgaccaacgatttagaattgcgtttagcatctgattttttta
ttaaatcgaatggtcggctctctggtttgctaccccaatgataacaatagtcttgtaaagataaaccgcaagaaaatttat
acgcatccatccaaataaccctagcaccatcggatgatattaatgtattattatagattttccatccacagttattgggcca
gtatactgttagcaacggtatatcgaatagattactcatgtaacctactagaatgatagttcgtgtactagtcataatatctt
taatccaatctaagaaatttaaaattagattttttacactgttaaagttaacaaaggtattacccggatacgtggatatcat
atatggtattggtccattatcagtaatagctccataaactgatacggcgatggtttttatatgtgtttgatctaacgaggaag
aaattcgcgcccacaattcatctctagatatgtatttaatatcaaacggtaacacatcaatttcgggacgcgtatatgtttc
taaatttttaatccaaatataatgatgacctatatgccctattatcatactgtcaactatagtacacctagagaacttacgat
acatctgtttcctataatcgttaaattttacaaatctataacatgctaaaccttttgacgacaaccattcattaatttctgatat
ggaatctgtattctcaataccgtatcgttctaaagccagtgctatatctccctgttcgtgagaacgctttcgtataatatcgat
caacggataatctgaagtttttggagaataatatgactcatgatctatttcgtccataaacaatctagacataggaattgg
aggcgatgatcttaattttgtgcaatgagtcgtcaatcctataacttctaatattgtaatattcatcatcgacataacactatc
tatgttatcatcgtatattagtataccatgaccttcttcatttcgtgccaaaatgatatacagtcttaaatagttacgcaatatc
tcaatagtttcataattgttagctgttttcatcaaggtttgtatcctgtttaacatgatggcgttctatacgtttctattttttaaatttt
taacgatttactgtggctagatacccaatctctctcaaatatttttttagcctcgcttacaagctgtttatctatactattaaaac
tgacgaatccgtgattttggtaatgggttccgtcgaaatttgccgaagtgatatgaacatattcgtcgtcgactatcaaca
attttgtattattctgaatagtgaaaaccttcacagatagatcattttgaacacacaacgcgtctagacttctggcggttgc
catagaatatacgtcgttcttatcccaattaccaactagaagtctgatcttaactcctctattaatggctgcttctataatgga
gttgtaaatgtcgggccaatagtagctattaccgtcgacacgtgtagtgggaactatggccaaatgttcaatatctatact
agtcttagccgacttgagtttatcaataactacatcagtgtctagatctctagaatatcccaataggtgttccggagaatc
agtaaagaacactccacctataggattcttaatatgatacgcagtgctaactggcagacaacaagccgcagagcat
aaattcaaccatgaattttttgcgctattaaaggctttaaaagtatcaaatcttctacgaagatctgtggccagcggggga
taatcagaatatacacctaacgttttaatcgtatgtatagatcctccagtaaatgacgcgtttcctacataacatctttcatt
atctgacacccaaaaacaaccgagtagtagtcccacattattttttttatctatattaacggttataaaatttatatccgggc
agtgactttgtagctctcccagatttcttttccctcgttcatctagcaaaactattattttaatccctttttcagatgcctcttttagt
ttatcaaaaataagcgctcccctagtcgtactcagaggattacaacaaaaagatgctatgtatatatatttcttagctaga
gtgataatttcgttaaaacattcaaatgttgttaaatgatcggatctaaaatccatattttctggtagtgtttctaccagcctac
attttgctcccgcaggtaccggtgcaaatggccacatttagttaacataaaaacttatacatcctgttctatcaacgattct
agaatatcatcggctatatcgctaaaattttcatcaaagtcgacatcacaacctaactcagtcaatatattaagaagttc
catgatgtcatcttcgtctatttctatatccgtatccattgtagattgttgaccgattatcgagtttaaatcattactaatactca
atccttcagaatacaatctgtgtttcattgtaaatttataggcggtgtatttaagttggtagattttcaattatgtatcaatatag
caacagtagttcttgctcctccttgattctagcatcctcttcattattttcttctacgtacataaacatgtccaatacgttagac
aacacaccgacgatggcggccgccacagacacgaatatgactaaaccgatgaccatttaaaaacccctctctagct
ttcacttaaactgtatcgattattcttttagaacatgtataatataaaaacattattctatttcgaatttaggcttccaaaaatttt
tcatccgtaaaccgataataatatatatagacttgttaatagtcggaataaatagattaatgcttaaactatcatcatctcc
acgattagagatacaatatttacattttttttgctgtttcgaaactttatcaatacacgttaatacaaacccaggaaggaga
tattgaaactgaggctgttgaaaatgaaacggtgaatacaataattcagataatgtaaaatcatgattccgtattctgatg
atattagaactgctaatggatgtcgatggtatgtatctaggagtatctattttaacaaagcatcgatttgctaatatacaatt
atcattttgattaattgttattttattcatattcttaaaaggtttcatatttatcaattcttctacattaaaaatttccatttttaatttatg
tagccccgcaatactcctcattacgtttcattttttgtctataatatccattttgttcatctcggtacatagattatccaattgaga
agcgcatttagtagttttgtacattttaagtttattgacgaatcgtcgaaaactagttatagttaacattttattatttgataccct
gatattaatacccctgccgttactattatttataactgatgtaatccacgtaacattggaattaactatcgatagtaatgcat
cgacgcttccaaaattgtctattataaactcaccgataatttttttattacatgttttcatattcattaggattattaaatctttaat
cttactacgattgtatgcgttgatattgcaagacgtcattctaaaagacggaggatctccatcaaatgccagacaatca
cgtacaaagtacatggaaataggttttgttctattgcgcatcatagatttatatagaacacccgtagaaatactaatttgttt
tactctataaaatactaatgcatctatttcatcgttttgtataacgtctttccaagtgtcaaattccaaatttttttcattgatagta
ccaaattcttctatctctttaactacttgcatagataggtaattacagtgatgcctacatgccgttttttgaaactgaatagat
gcgtctagaagcgatgctacgctagtcacaatcaccactttcatatttagaatatatatatgtaaaaatatagtagaatttc
attttgttttttttctatgctataaatgaattctcattttgcatctgctcatactccgttttatatcaataccaaagaaggaagatat
ctggttctaaaagccgttaaagtatgcgatgttagaactgtagaatgcgaaggaagtaaagcttcctgcgtactcaaa
gtagataaaccctcatcacccgcgtgtgagagaagaccttcgtccccttccagatgcgagagaatgaataacccag
gaaaacaagttccgtttatgaggacggacatgctacaaaatatgttcgcggctaatcgcgataatgtagcttctagactt
ttgtcctaaaatacaattatatccttttcgatattaataaatccgtgtcgtccaggttttttatctctttcagtatgtgaatagata
ggtattttatctctattcatcatcgaatttaagagatccgataaacattgtttgtattctccagatgtcagcatctgatacaac
aatatatgtgcacataaacctctggcacttatttcatgtaccttccccttatcactaaggagaatagtatttgagaaatatgt
atacatgatattatcatgaattagatatacagaatttgtaacactctcgaaatcacacgatgtgtcggcgttaagatctaa
tatatcactcgataacacattttcatctagatacactagacattttttaaagctaaaatagtctttagtagtaacagtaactat
gcgattattttcatcgatgatacatttcatcggcatattattacgcttaccatcaaagactataccatgtgtatatctaacgta
ttctagcatggttgccatacgcgcattaaacttttcaggatctttggatagatcttccaatctatctatttgagaaaacattttt
atcatgttcaatagttgaaacgtcggatccactatatagatattatctataaagattttaggaactacgttcatggtatcctg
gcgaatattaaaactatcaatgatatgattatcgttttcatcttttatcaccatatagtttctaagatatgggattttacttaatat
aatattatttcccgtaataaattttattagaaatgccaaatctataagaaaagtcctcgaattagtttgaagaatatctatat
cgccgtaccgtatatttggattaattagatatagagaatatgatccgtaacatatacaacttttattatggcgtctaagatat
tcttccatcaacttattaacatttttgactagggaagatacattatgacgtcccattacttttgccttgtctattactgcgacgtt
catagaatttagcatatctcttgccaattcttccattgatgttacattataagaaattttagatgaaattacatttggagcttta
atagtaagaactcctaatatgtccgtgtatgtggtcactaatacagattgtagttctataatcgtaaataatttacctatatta
tatgtttgagtctgtttagaaaagtagctaagtatacgatcttttatttctgatgcagatgtatcaacatcggaaaaaaatctt
tttttattcttttttactaaagatacaaatatgtctttgttaaaaacagttattttctgaatatttctagcttgtaattttaacatatgat
attcgttcacactaggtactctgcctaaataggtttctataatctttaatgtaatattaggaaaagtattctgatcaggattcct
attcattttgaggatttaaaactctgattattgtctaatatggtctcaacacaaactttttcacagagcgatagagtttttgata
actcgtttttcttaagaaatataaaactactgtctccagagctcgctctatcttttattttatttaattcgatacaaactcctgat
actggttcagaaagtaattcattaattttcagtcctttatagaagatatttaatatagataatacaaaatcttcagtttttgatat
cgatctgattgatcctagaactagatatattaataacgtgctcattaggcagtttatggcagcttgataattagatatagtat
attccagttcatatttattagataccgcattgcccagattttgatattctatgaattcctctgaaaataaatccaaaataacta
gacattctattttttgtggattagtgtactctcttccctctatcatgttcactactggtgtccacgatgataaatatctagaggg
aatataatatagtccataggatgccaatctagcaatgtcgaataactgtaattttattcttcgctcttcattatgaattgattctt
gaggtataaacctaacacaaattatattattagacttttcgtatgtaatgtctttcatgttataagtttttaatcctggaataga
atctattttaatgaggcttttaaacgcagagttctccaacgagtcaaagcataatactctgttggttttcttatatacgatgtta
cgattttcttctttgaatggaataggtttttgaattagtttataattacaacataatagataaggaagtgtgcaaatagtacg
cggaaaaaacataatagctcccctgttttcatccatggttttaagtaaatgatcactggcttctttagtcaatggatattcga
acattaaccgtttcatcatcattggacagaatccatatttcttaatgtaaagagtgatcaaatcattgtgtttattgtaccatct
tgttgtaaatgtgtattcggttatcggatctgctcctttttctattaaagtatcgatgtcgatctcgtctaagaattcaactatatc
gacatatttcatttgtatacacataaccattactaacgtagaatgtataggaagagatgtaacgggaacagggtttgttg
attcgcaaactattctaatacataattcttctgttaatacgtcttgcacgtaatctattatagatgccaagatatctatataatt
attttgtaagatgatgttaactatgtgatctatataagtagtgtaataattcatgtatttcgatatatgttccaactctgtctttgtg
atgtctagtttcgtaatatctatagcatcctcaaaaaatatattcgcatatattcccaagtcttcagttctatcttctaaaaaat
cttcaacgtatggaatataataatctattttacctcttctgatatcattaatgatatagtttttgacactatcttctgtcaattgatt
cttattcactatatctaagaaacggatagcgtccctaggacgaactactgccattaatatctctattatagcttctggacat
aattcatctattataccagaattaatgggaactattccgtatctatctaacatagttttaagaaagtcagaatctaagacct
gatgttcatatattggttcatacatgaaatgatctctattgatgatagtgactatttcattctctgaaaattggtaactcattcta
tatatgctttccttgttgatgaaggatagaatatactcaatagaatttgtaccaacaaactgttctcttatgaatcgtatatca
tcatctgaaataatcatgtaaggcatacatttaacaattagagacttgtctcctgttatcaatatactattcttgtgataattta
tgtgtgaggcaaatttgtccacgttctttaattttgttatagtagatatcaaatccaatggagctacagttcttggcttaaaca
gatatagtttttctggaacgaattctacaacattattataaaggactttgggtagataagtgggatgaaatcctattttaatt
aatgcgatagccttgtcctcgtgcagatatccaaacgcttttgtgatagtatggcattcattgtctagaaacgctctacga
atatctgtgacagatatcatctttagagaatatactagtcgcgttaatagtactacaatttgtattttttaatctatctcaataa
aaaaattaatatgtatgattcaatgtataactaaactactaactgttattgataactagaatcagaatctaatgatgacgta
accaagaagtttatctactgccaatttagctgcattatttttagcatctcgtttagattttccatctgccttatcgaatactcttcc
gtcgatatctacacaggcataaaatgtaggagagttactaggccccactgattcaatacgaaaagaccaatctctctt
agttatttggcagtactcattaataatggtgacagggttagcatctttccaatcaataatttttttagccggaataacatcatc
aaaagacttatgatcctctctcattgatttttcgcgggatacatcatctattatggcgtcagccataacatcagcatccggc
ttatccgcctccgttgtcataaaccaacgaggaggaatatcgtcggagctgtacaccatagcactacgttgaagatcgt
acagagctttattaacttctcgcttctccatattaagttgtctagttagttgtgcagcagtagctccttcgattccaatgttttta
atagccgcacacacaatctctgcgtcagaacgctcgtcaatatagatcttagacatttttagagagaactaacacaac
cagcaataaaactaatttattttatcatttttttattcatcatcctctggtggttcgtcgtttctatcgaatgtggatctgattaacc
cgtcatctataggtgatgctggttctggagattctggaggagatggattattatctggaagaatctctgttatttccttgttttc
atgtatcgattgcgttgtaacattaagattgcgaaatgctctaaatttgggaggcttaaagtgttgtttgcaatctctacacg
catgtctaactagtggaggttcgtcagcggctctagtttgaatcatcatcggcgtagtattcctacttttacagttaggaca
cggtgtattgtatttctcgtcgagaacgttaaaataatcgttgtaactcacatcctttattttatctatattgtattctactcctttct
taatgcattttataccgaataagagatagcgaaggaattctttttcggtgccgctagtacccttaatcatatcacatagtgtt
ttatattccaaatttgtggcaatagacggtttatttctatacgatagtttgtttctggaatcctttgagtattctataccaatattat
tctttgattcgaatttagtttcttcgatattagattttgtattacctatattcttgatgtagtactttgatgatttttccatggcccattct
attaagtcttccaagttggcatcatccacatattgtgatagtaattctcggatatcagtagcggctaccgccattgatgtttg
ttcattggatgagtaactactaatgtatacattttccatttataacacttatgtattaactttgttcatttatattttttcattattatgtt
gatattaacaaaagtgaatatatatgttaataattgtattgtggttatacggctacaatttcataatgagtggaagtcagtgt
ccgatgatcaatgacgatagctttactctgaaaagaaagtatcaaatcgatagtgcggagtcaacaataaaaatgga
taagaagaggataaagtttcagaatagagccaaaatggtaaaagaaataaatcagacaataagagcagcacaa
actcattacgagacattgaaactaggatacataaaatttaagagaatgattaggactactactctagaagatatagca
ccatctattccaaataatcagaaaacttataaactattctcggacatttcagccatcggcaaagcatcacagaatccga
gtaagatggtatatgctctgctgctttacatgtttcccaatttgtttggagatgatcatagattcattcgttatagaatgcatcc
aatgagtaaaatcaaacacaagatcttctctcctttcaaacttaatcttattagaatattagtggaagaaagattctataat
aatgaatgcagatctaataaatggagaataattggaacacaagttgataaaatgttgatagctgaatctgataaatata
caatagatgcaaggtataacctaaaacccatgtatagaatcaagggaaaatctgaagaagataccctctttatcaaa
cagatggtagaacaatgtgtgacatcccaggaattggtggaaaaagtgttgaagatactgtttagagatttgttcaaga
gtggagaatacaaagcgtacagatacgatgatgatgtagaaaatggatttattggattggatacactaaaattaaaca
ttgttcatgatatagttgaaccatgtatgcctgttcgtaggccagtggctaagatactgtgtaaagaaatggtaaataaat
actttgagaatccgctacatattattggtaaaaatcttcaagagtgcattgactttgttagtgaataggcatttcatctttctcc
aatactaattcaaattgttaaattaataatggatagtataaatagttattagtgataaaatagtaaaaataattattagaat
aagagtgtagtatcatagataactctcttctataaaaatggattttattcgtagaaagtatcttatatacacagtagaaaat
aatatagattttttaaaggatgatacattaagtaaagtaaacaattttaccctcaatcatgtactagctctcaagtatctagt
tagcaattttcctcaacacgttattactaaggatgtattagctaataccaatttttttgttttcatacatatggtacgatgttgta
aagtgtacgaagcggttttacgacacgcatttgatgcacccacgttgtacgttaaagcattgactaagaattatttatcgtt
tagtaacgcaatacaatcgtacaaggaaaccgtgcataaactaacacaagatgaaaaatttttagaggttgccgaat
acatggacgaattaggagaacttataggcgtaaattatgacttagttcttaatccattatttcacggaggggaacccatc
aaagatatggaaatcatttttttaaaactgtttaagaaaacagacttcaaagttgttaaaaaattaagtgttataagattac
ttatttgggcttacctaagcaagaaagatacaggcatagagtttgcggataatgatagacaagatatatacactctattt
caacaaactggtagaatagtccatagcaatctaacagaaacgtttagagattatatctttcccggagataagactagct
attgggtgtggttaaacgaaagtatagctaatgatgcggatattgttcttaatagacacgccattaccatgtatgataaaa
ttcttagttatatatactctgagataaaacaaggacgcgttaataaaaacatgcttaagttagtttatatctttgagcctgaa
aaagatatcagagaacttctgctagaaatcatatatgatattcctggagatatcctatctattattgatgcaaaaaacga
cgattggaaaaaatattttattagtttttataaagctaattttattaacggtaatacatttattagtgatagaacgtttaacgag
gacttattcagagttgttgttcaaatagatcccgaatatttcgataatgaacgaattatgtctttattctctacgagtgctgcg
gacattaaacgatttgatgagttagatattaataacagttatatatctaatataatttatgaggtgaacgatatcacattag
atacaatggatgatatgaagaagtgtcaaatctttaacgaggatacgtcgtattatgttaaggaatacaatacatacctg
tttttgcacgagtcggatcccatggtcatagagaacggaatactaaagaaactgtcatctataaaatccaagagtaga
cggctgaacttgtttagcaaaaacattttaaaatattatttagacggacaattggctcgtctaggtcttgtgttagatgattat
aaaggagacttgttagttaaaatgataaaccatcttaagtctgtggaggatgtatccgcattcgttcgattttctacagata
aaaaccctagtattcttccatcgctaatcaaaactattttagctagttataatatttccatcatcgtcttatttcaaaggtttttg
agagataatctatatcatgtagaagaattcttggataaaagcatccatctaaccaagacggataagaaatatatacttc
aattgataagacacggtagatcatagaacagaccaaatatattattaataatttgtatatacatagatataattatcacac
atttttgataaatgggaactgctgcaacaattcagactcccaccaaattaatgaataaagaaaatgcagaaatgatttt
ggaaaaaattgttgatcatatagttatgtatattagtgacgaatcaagtgattcagaaaataatcctgaatatattgattttc
gtaacagatacgaagactatagatctctcattataaaaagtgatcacgagtttgtaaagctatgtaaaaatcatgcaga
gaaaagttctccagaaacgcaacaaatgattatcaaacacatatacgaacaatatcttattccagtatctgaagtacta
ttaaaacctataatgtccatgggtgacataattacatataacggatgtaaagacaatgaatggatgctagaacaactct
ctaccctaaactttaacaatctccgcacatggaactcatgtagcataggcaatgtaacgcgtctgttttatacattttttagtt
atctgatgaaagataaactaaatatataagtataatcccattctaatactttaacctgatgtattacctgcatcttattagaa
tattaacctaactaaaagacataacatagttgataaaaagcggtaggatataaatattatggctgccaccgttccgcgtt
ttgacgacgtgtacaaaaatgcacaaagaagaattctagatcaagaaacattttttagtagaggtctaagtagaccgtt
aatgaaaaacacatatctatttgataattacgcgtatggatggataccagaaactgcaatttggagtagtagatacgca
aacttagatgcaagtgactattatcccatttcgttgggattacttaaaaagttcgagtttctcatgtctctatataaaggtcct
attcccgtatatgaagaaaaagtaaatactgaattcattgctaatggatcgttctctggtagatacgtatcatatcttcgaa
agttttctgcccttccaacaaacgagtttattagttttttgttactgacttccattccaatctataatatcttgttctggtttaaaaa
tactcagtttgatattactaaacacacattattcagatacgtctatacagataatgccaaacacctggcgttggctaggta
tatgcatcaaacaggagactataagcctttgtttagtcgtctcaaagagaattatatatttaccggtcccgttccaataagt
atcaaagatatagatcaccctaatcttagtagagcaagaagtccatccgattatgagacattagctaatattagtactat
attgtactttaccaagtatgatccggtattaatgtttttattgttttacgtacctgggtattcaattactacaaaaattactccag
ccgtagaatatctaatggataaactgaatctaacaaagagcgacgtacaactgttgtaaattattttatgcttcgtaaaat
gtaggttttgaaccaaacattctttcaaagaatgagatgcataaaactttattatccaatagattgactatttcggacgtca
atcgtttaaagtaaacttcgtaaaatattctttgatcactgccgagtttaaaacttctatcgataattgtttcatatgttttaatat
ttacaagttttttggtccatggtacattagccggacaaatatatgcaaaataatatcgttctccaagttctatagtttctggatt
atttttattatattcagtaaccaaatacatattagggttatctgcggatttataatttgagtgatgcattcgactcaacataaat
aattctagaggagacgatctactatcaaattcggatcgtaaatctgtttctaaagaacggagaatatctatacatacctg
attagaattcatccgtccttcagacaacatctcagacagtctggtcttgtatgtcttaatcatattcttatgaaacttggaaa
catctcttctagtttcactagtacctttattaattctctcaggtacagattttgaattcgacgatgctgagtatttcatcgttgtat
atttcttcttcgattgcataatcagattcttatataccgcctcaaactctattttaaaattattaaacaatactctattattaatca
gtcgttctaactctttcgctatttctatagacttatcgacatcttgactgtctatctctgtaaacacggagtcggtatctccata
cacgctacgaaaacgaaatctgtaatctataggcaacgatgttttcacaatcggattaatatctctatcgtccatataaa
atggattacttaatggattggcaaaccgtaacataccgttagataactctgctccatttagtaccgattctagatacaaga
tcattctacgtcctatggatgtgcaactcttagccgaagcgtatgagtatagagcactatttctaaatcccatcagaccat
atactgagttggctactatcttgtacgtatattgcatggaatcatagatggccttttcagttgaactggtagcctgttttagcat
ctttttatatctggctctctctgccaaaaatgttcttaatagtctaggaatggttccttctatcgatctatcgaaaattgctatttc
agagatgaggttcggtagtctaggttcacaatgaaccgtaatatatctaggaggtggatatttctgaagcaagagctga
ttatttatttcttcttccaatctattggtactaacaacgacaccgactaatgtttccggagatagatttccaaagatacacac
attaggatacagactgttataatcaaagattaatacattattactaaacattttttgttttggagcaaataccttaccgccttc
ataaggaaacttttgttttgtttctgatctaactaagatagttttagtttccaacaatagctttaacagtggacccttgatgact
gtactcgctctatattcgaataccatggattgaggaagcacatatgttgacgcacccgcgtctgtttttgtttctactccata
atactcccacaaatactgacacaaacaagcatcatgaatacagtatctagccatatctaaagctatgtttagattataat
ccttatacatctgagctaaatcaacgtcatcctttccgaaagataatttatatgtatcattaggtaaagtaggacatgatag
tacgactttaaatccattttcccaaatatctttacgaattactttacatataatatcctcatcaacagtcacataattacctgtg
gttaaaacctttgcaaatgcagcggctttgcctttcgcgtccgtagtatcgtcaccgatgaacgtcatttctctaactcctct
atttaatactttacccatgcaactgaacgcgttcttggatatagaatccaatttgtacgaatccaatttttcagatttttgaatg
aatgaatatagatcgaaaaatatagttccattattgttattaacgtgaaacgtagtattggccatgccgcctactcccttat
gactagactgatttctctcataaatacagagatgtacagcttcctttttgtccggagatctaaagataatcttctctcctgtta
ataactctagacgattagtaatatatctcagatcaaagttatgtccgttaaaggtaacgacgtagtcgaacgttagttcca
acaattgtttagctattcgtaacaaaactatttcagaacatagaactagttctcgttcgtaatccatttccattagtgactgta
tcctcaaacatcctctatcgacggcttcttgtatttcctgttccgttaacatctcttcattaatgagcgtaaacaataatcgttt
accacttaaatcgatataacagtaacttgtatgcgagattgggttaataaatacagaaggaaacttcttatcgaagtga
cactctatatctagaaataagtacgatcttgggatatcgaatctaggtatttttttagcgaaacagttacgtggatcgtcac
aatgataacatccattgttaatctttgtcaaatattgctcgtccaacgagtaacatccgtctggagatatcccgttagaaat
ataaaaccaactaatattgagaaattcatccatggtggcattttgtatgctgcgtttctttggctcttctatcaaccacatatc
tgcgacggagcattttctatctttaatatctagattataacttattgtctcgtcaatgtctatagttctcatctttcccaacggcct
cgcattaaatggaggaggagacaatgactgatatatttcgtccgtaactacgtaataaaagtaatgaggaaatcgtat
aaatacggtctcgccatttcgacatctggatttcagatataaaaatctgttttcaccgtgactttcaaaccaattaatgcac
cgaacatccatttatagaatttagaaatatattttcatttaaatgaatcccaaacattggggaagagccgtatggaccatt
atttttatagtactttcgcaagcgggtttagacggcaacatagaagcgtgtaaacgaaaactatatactatagtcagcac
tcttccatgtcctgcatgtagacggcacgcgactatcgctatagaggacaataatgtcatgtctagcgatgatctgaatt
atatttattattttttcatcagattatttaacaatttggcatctgatcccaaatacgcgatcgatgtgacaaaggttaacccttt
ataaacttaacccattataaaacttatgattagtcacgactgaaataaccgcgtgattattttttggtataattctacacggc
atggtttctgtaactatgaattcaacccccgttacattagtgaaatctttaacaaacagcaagggttcgtcaaagacata
aaactcattgtttacaatcgaaatagaccccctatcacacttaaaataaaaaatatccttatcctttaccaccaaataaa
attctgattggtcaatgtgaatgtattcacttaacagttccacaaatttatttattaactccgaggcacatacatcgtcggtat
tttttatggcaaactttactcttccagcatccgtttctaaaaaaatattaacgagttccatttatatcatccaatattattgaaat
gacgttgatggacagatgatacaaataagaaggtacggtacctttgtccaccatctcctccaattcatgctctattttgtca
ttaactttaatgtatgaaaacagtacgccacatgcttccatgacagtgtgtaacactttggatacaaaatgtttgacattag
tataattgtccaagactgtcaatctataatagatagtagctataatatattctatgatggtattgaagaagatgacaatcttg
gcatattgatcatttaacacagacatggtatcaacagatagcttgaatgaaagagaatcagtaattggaataagcgtct
tctcgatagagtgtccgtataccaacatgtctgatattttgatgtattccattaaattatttagttttttctttttattctcgttaaaca
gcatttctgtcaacggaccccaacatcgttgaccgattaagttttgattgatttttccgtgtaaggcgtatctagtcagatcg
tatagcctatccaataatccatcatctgtgcgtagatcacatcgtacactttttaattctctatagaagagcgacagacag
caatttctttattctctacagatgtaagatacttgaagacattcctatgatgatgcagaattttggataacacggtattgatg
gtatctgttaccataattcctttgatggctgatagtgtcagagcacaagatttccaatctttgttttgatatctatatcagacag
catggtgcgtctgacaacacaaggattaagacggaaagatgaaatgattctctcaacatcttcaatggataccttgcta
ttttttctggcattatctatatgtgcgagaatatcctctagagaatcagtatcctttttgatgatagtggatctcaatgacatgg
gacgtctaaaccttcttattctatcaccagattgcatggtgatttgtcttctttcttttatcataatgtaatctctaaattcatcggc
aaattgtctatatctaaaatcataatatgagatgtttacctctacaaatatctgttcgtccaatgttagagtatctacatcagtt
ttgtattccaaattaaacatggcaacggatttaattttatattcctctattaagtcctcgtcgataataacagaatgtagata
atcatttaatccatcgtacatggttggaagatgcttgttgacaaaatctttaattgtcttgatgaaggtgggactatatctaa
catcttgattaataaaatttataacattgtccataggatactttgtaactagttttatacacatctcttcatcggtaagtttagac
agaatatcgtgaacaggtggtatattatattcatcagatatacgaagaacaatgtccaaatctatattgtttaatatattata
tagatgtagcgtagctcctacaggaatatctttaactaagtcaatgatttcatcaaccgttagatctattttaaagttaatcat
ataggcattgatttttaaaaggtatgtagccttgactacattctcattaattaaccattccaagtcactgtgtgtaagaagat
tatattctatcataagcttgactacatttggtcccgataccattaaagaattcttatgatataaggaaacagattttaggtac
tcatctactctacaagaattttggagagccttaacgatatcagtgacgtttattatttcaggaggaaagaatctaacattg
agaatatcggaattaatagcttccagatacagtgattttggcaatagtccgtgtaatccataatccagtaacacgagctg
gtgcttgctagacaccttttcaatgtttaatttttttgaaataagctttgataaagccttcctcgcaaattccggatacatgaa
catgtcggcgacatgattaagtattgttttttcattattttctcaacaagttctcaataccccaatagatgatagaatatcacc
caatgcgtccatgttgtctatttccaacaggtcgctatatccaccaatagaagtttttccaaaaaagattctaggaacagt
tctaccaccagtaatttgttcaaaatagtcacgcaattcattttcgggtttaaattctttaatatcgacaatttcatacgctcct
cttttgaaactaaacttatttagaatatccagtgcatttctacaaaaaggacatgtatacttgacaaaaattgtcactttgtt
attggccaacctttgttgtacaaattcctcggccattttaatatttaagtgatataaaactatctcgacttatttaactctttagt
cgagatatatggacgcagatagctatatgatagccaactacagaaggcaaacgctataaaaaacataattacgacg
agcatatttataaatatttttattcagcattacttgatatagtaatattaggcacagtcaaacattcaaccactctcgatacat
taactctctcattttctttaacaaattctacaatatcttcgtaaaaagattcttgaaactttttagaatatctatcgactctagat
gaaatagcgttcgtcaacatactatgttttgtatacataaaggcgcccattttaacagtttctagtgacaaaatgctagcg
atcctaggatcctttagaatcacatagattgacgattcgtctctcttagtaactctagtaaaataatcatacaatctagtac
gcgaaataatattatccttgacttgaggagatctaaacaatctagttttgagaacatcgataagttcatcgggaatgaca
tacatactatctttaatagaactcttttcatccagttgaatggattcgtccttaaccaactgattaatgagatcttctattttatc
attttccagatgatatgtatgtccattaaagttaaattgtgtagcgcttctttttagtctagcagccaatactttaacatcacta
atatcgatatacaaaggagatgatttatctatggtattaagaattcgtttttcgacatctgtcaaaaccaattcctttttgcctg
tatcatccagttttccatcctttgtaaagaaattattttctactagactattaataagactgataaggattcctccataattgca
caatccaaactttttaacaaaactagactttacaagatctacaggaatgcgtaattcaggtttcttagcttgtgattttttctttt
gtggacattttcttgtgaccaactcatctaccatttcattgattttagcagtgaaataagctttcaatgcacgggcactgata
ctattgaaaacgagttgatcttcaaattccgccatttaagttcaccaaacaacttttaaatacaaatatatcaatagtagta
gaataagaactataaaaaaaataataattaaccaataccaaccccaacaaccggtattattagttgatgtgactgttttc
tcatcacttagaacagatttaacaatttctataaagtctgtcaaatcatcttccggagaccccataaatacaccaaatata
gcggcgtacaacttatccatttatacattgaatattggcttttctttatcgctatcttcatcatattcatcatcaatatcaacaag
tcccagattacgagccagatcttcttctacattttcagtcattgatacacgttcactatctccagagagtccgataacgtta
gccaccacttctctatcaatgattagtttcttgagtgcgaatgtaatttttgtttccgttccggatctatagaagacgataggt
gtgataattgccttggccaattgtctttctcttttactgagtgattctagttcaccttctatagatctgagaatggatgattctcc
agtcgaaacatattctaccatggatccgtttaatttgttgatgaagatggattcatccttaaatgttttctctgtaatagtttcca
ccgaaagactatgcaaagaatttggaatgcgttccttgtgcttaatgtttccatagacggcttctagaagttgatacaaca
taggactagccgcggtaacttttatttttagaaagtatccatcgcttctatcttgtttagatttatttttataaagtttagtctctcct
tccaacataataaaagtggaagtcatttgactagataaactatcagtaagttttatagagatagacgaacaattagcgt
attgagaagcatttagtgtaacgtattcgatacattttgcattagatttactaatcgattttgcatactctataacacccgcac
aagtctgtagagaatcgctagatgcagtaggtcttggtgaagtttcaactctcttcttgattaccttactcatgattaaacct
aaataattgtactttgtaatataatgatatatattttcactttatctcatttgagaataaaaatgtttttgtttaaccactgcatgat
gtacagatttcggaatcgcaaaccaccagtggttttattttatccttgtccaatgtgaattgaatgggagcggatgcgggtt
tcgtacgtagatagtacattcccgtttttagaccgagactccatccgtaaaaatgcatactcgttagtttggaataactcg
gatctgctatatggatattcatagattgactttgatcgatgaaggctcccctgtctgcagccatttttatgatcgtcttttgtgg
aatttcccaaatagttttataaactcgcttaatatcttctggaaggtttgtattctgaatggatccaccatctgccataatcct
attcttgatctcatcattccataattttctctcggttaaaactctaaggagatgcggattaactacttgaaattctccagaca
atactctccgagtgtaaatattactggtatacggttccaccgactcattatttcccaaaatttgagcagttgatgcagtcgg
cataggtgccaccaataaactatttctaagaccgtatgttctgattttatcttttagaggttcccaattccaaagatccgacg
gtacaacattccaaagatcatattgtagaataccgttactggcgtacgatcctacatatgtatcgtatggtccttccttctca
gctagttcacaactcgcctctaatgcaccgtaataaatggtttcgaagatcttcttatttagatcttgtgcttccaggctatca
aatggataatttaagagaataaacgcgtccgctaatccttgaacaccaataccgataggtctatgtctcttattagagatt
tcagcttctggaataggataataattaatatctataattttattgagatttctgacaattactttgaccacatccttcagtttga
gaaaatcaaatcgcccatctattacaaacatgttcaaggcaacagatgccagattacaaacggctacctcattagcat
ccgcatattgtattatctcagtgcaaagattactacacttgatagttcctaaattttgttgattactctttttgttacacgcatcct
tataaagaatgaatggagtaccagtttcaatctgagattctataatcgctttccagacgactcgagcctttattatagatttg
tatctcctttctctttcgtatagtgtatacaatcgttcgaactcgtctccccaaacattgtccaatccaggacattcatccgga
cacatcaacgaccactctccgtcatccttcactcgtttcataaagagatcaggaatccaaagagctataaatagatctc
tggttctatgttcctcgtttcctgtattctttttaagatcgaggaacgccataatatcagaatgccacggttccaagtatatgg
ccataactccaggccgtttgtttcctccctgatctatgtatctagcggtgttattataaactctcaacattggaataataccgt
ttgatataccattggtaccggagatatagcttccactggcacgaatattactaattgatagacctattccccctgccatttta
gagattaatgcgcatcgttttaacgtgtcatagataccctctatgctatcatcgatcatgttaagtagaaaacagctagac
atttggtgacgactagttcccgcattaaataaggtaggagaagcgtgcgtaaaccatttttcagaaagtagattgtacgt
ctcaatagctgagtctatatcccattgatgaattcctactgcgacacgcattaacatgtgctgaggtctttcaacgatcttgt
tgtttattttcaacaagtaggatttttccaaagttttaaaaccaaaatagttgtatgaaaagtctcgttcgtaaataataacc
gagttgagtttatccttatatttgttaactatatccatggtgatacttgaaataatcggagaatgtttcccatttttaggattaac
atagttgaataaatcctccatcacttcactaaatagtttttttgtttccttgtgtagatttgatacggctattctggcggctagaa
tggcataatccggatgttgtgtagtacaagtggctgctatttcggctgccagagtgtccaattctaccgttgttactccatta
tatattccttgaataaccttcatagctattttaataggatctatatgatccgtgtttaagccataacataattttctaatacgag
acgtgattttatcaaacatgacattttccttgtatccatttcgtttaatgacaaacatttttgttggtgtaataaaaaaaattattt
aacttttcattaatagggatttgacgtatgtagcgtacaaaattatcgttcctggtatatagataaagagtcctatatatttga
aaatcgttacggctcgattaaactttaatgattgcatagtgaatatatcattaggatttaactccttgactatcatggcggcg
ccagaaattaccatcaaaagcattaatacagttatgccgatcgcagttagaacggttatagcatccaccatttatatcta
aaaattagatcaaagaatatgtgacaaagtcctagttgtatactgagaattgacgaaacaatgtttcttacatatttttttttt
attagtaaccgacttaatagtaggaactggaaaactagacttgattattctataagtatagatacccttccaaataatatt
ctctttgataaaagttccagaaaatgtagaattttttaaaaagttatcttttgctattaccaagattgtgtttagacgcttattatt
aatatgagtgatgaaatccacaccgcctctagatatcgcttttatttccacattagatggtaaatccaatagtgaaactat
ctttttaggaatgtatggactcgcgtttagaggagtgaacgtcttaggcgtcggaaaggggccggcctttttttctagaca
ctaaataaatagtaagattaaattaattataaaattatgtatataatattaattataaaattatgtatatgatttactaacttta
gttagataaattaataatacataaattttagtatattaatattataaattaataatacataaattttagtatattaatattatatttt
aaatatttatttagtgtctagaaaaaaaggcctagcaggcc

[0072] Sequence of sMVA fragment 2 (F2, 63035 bp in length) (deposited with NCBI under Accession No. MW023924, www.ncbi.nlm.nih.gov/nuccore/MW023924.1/) (SEQ ID NO: 13):

ggcctagcaggcctttttttctagacactaaataaatagtaagattaaattaattataaaattatgtatataatattaattata
aaattatgtatatgatttactaactttagttagataaattaataatacataaattttagtatattaatattataaattaataatac
ataaattttagtatattaatattatattttaaatatttatttagtgtctagaaaaaaaggccggccataaaaatgtttttgtttaa
ccactgcatgatgtacagatttcggaatcgcaaaccaccagtggttttattttatccttgtccaatgtgaattgaatgggag
cggatgcgggtttcgtacgtagatagtacattcccgtttttagaccgagactccatccgtaaaaatgcatactcgttagttt
ggaataactcggatctgctatatggatattcatagattgactttgatcgatgaaggctcccctgtctgcagccatttttatga
tcgtcttttgtggaatttcccaaatagttttataaactcgcttaatatcttctggaaggtttgtattctgaatggatccaccatct
gccataatcctattcttgatctcatcattccataattttctctcggttaaaactctaaggagatgcggattaactacttgaaat
tctccagacaatactctccgagtgtaaatattactggtatacggttccaccgactcattatttcccaaaatttgagcagttg
atgcagtcggcataggtgccaccaataaactatttctaagaccgtatgttctgattttatcttttagaggttcccaattccaa
agatccgacggtacaacattccaaagatcatattgtagaataccgttactggcgtacgatcctacatatgtatcgtatgg
tccttccttctcagctagttcacaactcgcctctaatgcaccgtaataaatggtttcgaagatcttcttatttagatcttgtgctt
ccaggctatcaaatggataatttaagagaataaacgcgtccgctaatccttgaacaccaataccgataggtctatgtct
cttattagagatttcagcttctggaataggataataattaatatctataattttattgagatttctgacaattactttgaccacat
ccttcagtttgagaaaatcaaatcgcccatctattacaaacatgttcaaggcaacagatgccagattacaaacggcta
cctcattagcatccgcatattgtattatctcagtgcaaagattactacacttgatagttcctaaattttgttgattactctttttgtt
acacgcatccttataaagaatgaatggagtaccagtttcaatctgagattctataatcgctttccagacgactcgagcctt
tattatagatttgtatctcctttctctttcgtatagtgtatacaatcgttcgaactcgtctccccaaacattgtccaatccagga
cattcatccggacacatcaacgaccactctccgtcatccttcactcgtttcataaagagatcaggaatccaaagagcta
taaatagatctctggttctatgttcctcgtttcctgtattctttttaagatcgaggaacgccataatatcagaatgccacggtt
ccaagtatatggccataactccaggccgtttgtttcctccctgatctatgtatctagcggtgttattataaactctcaacattg
gaataataccgtttgatataccattggtaccggagatatagcttccactggcacgaatattactaattgatagacctattc
cccctgccattttagagattaatgcgcatcgttttaacgtgtcatagataccctctatgctatcatcgatcatgttaagtaga
aaacagctagacatttggtgacgactagttcccgcattaaataaggtaggagaagcgtgcgtaaaccatttttcagaa
agtagattgtacgtctcaatagctgagtctatatcccattgatgaattcctactgcgacacgcattaacatgtgctgaggt
ctttcaacgatcttgttgtttattttcaacaagtaggatttttccaaagttttaaaaccaaaatagttgtatgaaaagtctcgtt
cgtaaataataaccgagttgagtttatccttatatttgttaactatatccatggtgatacttgaaataatcggagaatgtttcc
catttttaggattaacatagttgaataaatcctccatcacttcactaaatagtttttttgtttccttgtgtagatttgatacggctat
tctggcggctagaatggcataatccggatgttgtgtagtacaagtggctgctatttcggctgccagagtgtccaattctac
cgttgttactccattatatattccttgaataaccttcatagctattttaataggatctatatgatccgtgtttaagccataacata
attttctaatacgagacgtgattttatcaaacatgacattttccttgtatccatttcgtttaatgacaaacatttttgttggtgtaa
taaaaaaaattatttaacttttcattaatagggatttgacgtatgtagcgtacaaaattatcgttcctggtatatagataaag
agtcctatatatttgaaaatcgttacggctcgattaaactttaatgattgcatagtgaatatatcattaggatttaactccttg
actatcatggcggcgccagaaattaccatcaaaagcattaatacagttatgccgatcgcagttagaacggttatagca
tccaccatttatatctaaaaattagatcaaagaatatgtgacaaagtcctagttgtatactgagaattgacgaaacaatg
tttcttacatattttttttttattagtaaccgacttaatagtaggaactggaaaactagacttgattattctataagtatagatac
ccttccaaataatattctctttgataaaagttccagaaaatgtagaattttttaaaaagttatcttttgctattaccaagattgt
gtttagacgcttattattaatatgagtgatgaaatccacaccgcctctagatatcgcttttatttccacattagatggtaaatc
caatagtgaaactatctttttaggaatgtatggactcgcgtttagaggagtgaacgtcttaggcgtcggaaaggatgatt
catcaaacgaataaacaatttcacaaatggatgttaatgtattagtaggaaattttttgacgctagtggaattgaagattct
aatggatgatgttctacctatttcatccgataacatgttaatttccgacaccaacggttttaatatttcgatgatatacggtag
tctctctttcggacttatatagcttattccacaatacgagtcattatatactccaaaaaacaaaataactagtataaaatct
gtatcgaatgggaaaaacgaaattatcgacataggtatagaatctggaacattgaacgtattaatacttaattctttttctg
tggtaagtaccgataggttattgacattgtatggttttaaatattctataacttgagacttgatagatattagtgatgaattga
aaattatttttatcaccacgtgtgtttcaggatcatcgtcgacgcccgtcaaccaaccgaatggagtaaaataaatatca
ttaatatatgctctagatattagtatttttatcaatcctttgattatcatcttctcgtaggcgaatgattccatgatcaagagtga
tttaagaacatcctccggagtattaatgggcttagtaaacagtccatcgttgcaataataaaagttatccaagttaaagg
atattatgcattcgtttaaagatatcacctcatctgacggagacaattttttggtaggttttagagactttgaagctacttgttt
aacaaagttattcatcgtcgtttactattctatttaattttgtagttaatttatcacatatcacattaattgactttttggtccatttttc
catacgtttatattcttttaatcctgcgttatccgtttccgttatatccagggatagatcttgcaagttaaatagaatgctcttaa
ataatgtcattttcttatccgctaaaaatttaaagaatgtataaacctttttcagagatttgaaactcttaggtggtgtcctagt
acacaatatcataaacaaactaataaacattccacattcagattccaacagctgattaacttctacattaatacagccta
ttttcgctccaaatgtacattcgaaaaatctgaataaaacatcgatgtcacaatttgtattatccaatacagaatgtttgtga
ttcgtgttaaaaccatcggagaaggaataaaaataaaaattattatagtggtggaattcagttggaatattgcctccgga
gtcataaaaggatactaaacattgttttttatcataaattacacatttccaatgagacaaataacaaaatccaaacattac
aaatctagaggtagaacttttaattttgtctttaagtatatacgataagatatgtttattcataaacgcgtcaaatttttcatga
atcgctaaggagtttaagaatctcatgtcaaattgtcctatataatccacttcggatccataagcaaactgagagactaa
gttcttaatacttcgattgctcatccaggctcctctctcaggctctattttcatcttgacgacctttggattttcaccagtatgtat
tcctttacgtgataaatcatcgattttcaaatccatttgtgagaagtctatcgccttagatactttttcccgtagtcgaggttta
aagaaatacgctaacggtatactagtaggtaactcaaagacatcatatatagaatggtaacgcgtctttaactcgtcgg
ttaactctttcttttgatcgagttcgtcgctactattgggtctgctcaggtgccccgactctactagttccaacatcataccgat
aggaatacaagacactttgccggcggttgtagatttatcatatttctccactacatatccgttacaatttgttaaaaatttag
atacatctatattgctacataatccagctagtgaatatatatgacataataaattggtaaatcctagttctggtattttactaa
ttactaaatctgtatatctttccatttatcatggaaaagaatttaccagatatcttcttttttccaaactgcgttaatgtattctctt
acaaatattcacaagatgaattcagtaatatgagtaaaacggaacgtgatagtttctcattggcggtgtttccagttataa
aacatagatggcataacgcacacgttgtaaaacataaaggaatatacaaagttagtacagaagcacgtggaaaaa
aagtatctcctccatcactaggaaaacccgcacacataaacctaaccgcgaagcaatatatatacagtgaacacac
aataagctttgaatgttatagttttctaaaatgtataacaaatacagaaatcaattcgttcgatgagtatatattaagagga
ctattagaagctggtaatagtttacagatattttccaattccgtaggtaaacgaacagatactataggtgtactagggaat
aagtatccatttagcaaaattccattggcctcattaactcctaaagcacaacgagagatattttcagcgtggatttctcat
agacctgtagttttaactggaggaactggagtgggtaagacgtcacaggtacccaagttattgctttggtttaattatttatt
tggtggattctctactctagataaaatcactgactttcacgaaagaccagtcattctatctcttcctaggatagctttagtta
gattgcatagcaataccattttaaaatcattgggatttaaggtactagatggatctcctatttctttacggtacggatctatac
cggaagaattaataaacaaacaaccaaaaaaatatggaattgtattttctacccataagttatctctaacaaaactattt
agttatggcactcttattatagacgaagttcatgagcatgatcaaataggagatattattatagcagtagcgagaaagc
atcatacgaaaatagattctatgtttttaatgactgccacgttagaggatgacagggaacggctaaaagtatttttaccta
atcccgcatttatacatattcctggagatacactgtttaaaattagcgaggtatttattcataataagataaatccatcttcc
agaatggcatacatagaagaagaaaagagaaatttagttactgctatacagatgtatactcctcctgatggatcatcc
ggtatagtctttgtggcatccgttgcacagtgtcacgaatataaatcatatttagaaaaaagattaccgtatgatatgtata
ttattcatggtaaggtcttagatatagacgaaatattagaaaaagtgtattcatcacctaatgtatcgataattatttctactc
cttatttggaatccagcgttactatacgcaatgttacacacatttatgatatgggtagagtttttgtccccgctccttttggag
gatcgcaagaatttatttctaaatctatgagagatcaacgaaaaggaagagtaggaagagttaatcctgggacatac
gtatatttctatgatctgtcttatatgaagtctatacagcgaatagattcagaatttctacataattatatattgtacgctaata
agtttaatctaacactccccgaagatttgtttataatccctacaaatttggatattctatggcgtacaaaggaatatataga
ctcgttcgatattagtacagaaacatggaataaattattatccaattattatatgaagatgatagagtatgctaaactttatg
tactaagtcctattctcgctgaggagttggataattttgagaggacgggagaattaactagtattgtacaagaagccattt
tatctctaaatttacgaattaagattttaaattttaaacataaagatgatgatacgtatatacacttttgtaaaatattattcgg
tgtctataacggaacaaacgctactatatattatcatagacctctaacgggatatatgaatatgatttcagatactatattt
gttcctgtagataataactaaaaatcaaactctaatgaccacatctttttttagagatgaaaaattttccacatctccttttgt
agacacgactaaacattttgcagaaaaaagtttattagtgtttagataatcgtatacttcatcagtgtagatagtaaatgtg
aacagataaaaggtattcttgctcaatagattggtaaattccatagaatatattaatcctttcttcttgagatcccacatcatt
tcaaccagagacgttttatccaatgatttacctcgtactataccacatacaaaactagattttgcagtgacgtcgtatctgg
tattcctaccaaacaaaattttacttttagttcttttagaaaattctaaggtagaatctctatttgccaatatgtcatctatggaa
ttaccactagcaaaaaatgatagaaatatatattgatacatcgcagctggttttgatctactatactttaaaaacgaatca
gattccataattgcctgtatatcatcagctgaaaaactatgttttacacgtattccttcggcatttctttttaatgatatatcttgtt
tagacaatgataaagttatcatgtccatgagagacgcgtctccgtatcgtataaatatttcattagatgttagacgcttcatt
aggggtatacttctataaggtttcttaatcagtccatcattggttgcgtcaagaactactatcggatgttgttgggtatctcta
gtgttacacatggccttactaaagtttgggtaaataactatgatatctctattaattatagatgcatatatttcatttgtcaagg
atattagtatcgacttgctatcgtcattaatacgtgtaatgtaatcatataaatcatgcgatagccaaggaaaatttaaata
gatgttcatcatataatcgtcgctataattcatattaatacgttgacattgactaatttgtaatatagcctcgccacgaagaa
agctctcgtattcagtttcatcgataaaggataccgttaaatataactggttgccgatagtctcatagtctattaagtggtaa
gtttcgtacaaatacagaatccctaaaatattatctaatgttggattaatctttaccataactgtataaaatggagacgga
gtcataactattttaccgtttgtacttactggaatagacgaaggaataatctccggacatgctggtaaagacccaaatgt
ctgtttgaagaaatccaatgttccaggtcctaatctcttaacaaaaattacgatattcgatcccgatatcctttgcattctattt
accagcatatcacgaactatattaagattatctatcatgtctattctcccaccgttatataaatcgcctccgctaagaaac
gttagtatatccatacaatggaatacttcatttctaaaatagtattcgttttctaattctttaatgtgaaatcgtatactagaaa
gggaaaaattatctttgagttttccgttagaaaagaaccacgaaactaatgttctgattgcgtccgattccgttgctgaatt
aatggatttacaccaaaaactcatataacttctagatgtagaagcattcgctaaaaaattagtagaatcaaaggatata
agtagatgttccaacaagtgagcaattcccaagatttcatctatatcattctcgaatccgaaattagaaattcccaagta
gatatcctttttcatccgatcgttgatgaaaatacgaactttattcggtaagacaatcatttactaaggagtaaaatagga
agtaatgttcgtatgtcgttatcatcgtataaattaaaggtgtgttttttaccattaagtgacattataattttaccaatattgga
attataatataggtgtatttgcgcactcgcgacggttgatgcatcggtaaatatagctgtatctaatgttctagtcggtatttc
atcatttcgctgtctaataatagcgttttctctatctgtttccattacagctgcctgaagtttattggtcggataatatgtaaaat
aataagaaatacatacgaataacaaaaataaaataagatataataaagatgccatttagagatctaattttgtttaactt
gtccaaattcctacttacagaagatgaggaatcgttggagatagtgtcttccttatgtagaggatttgaaatatcttatgat
gacttgataacttactttccagataggaaataccataaatatatttctaaagtatttgaacatgtagatttatcggaggaatt
aagtatggaattccatgatacaactctgagagatttagtctatcttagattgtacaagtattccaagtgtatacggccgtgt
tataaattaggagataatctaaaaggcatagttgttataaaggacaggaatatttatattagagaagcaaatgatgactt
gatagaatatctcctcaaggaatacactcctcagatttatacatattctaatgagcgcgtccccataactggttcaaaatt
aattctttgtggattttctcaagttacatttatggcgtatacaacgtcgcatataacaacaaataaaaaggtagatgttctc
gtttccaaaaaatgtatagatgaactagtcgatccaataaattatcaaatacttcaaaatttatttgataaaggaagcgg
aacaataaacaaaatactcaggaagatattttattcggtaaccggtggccaaactccataatttgctttttctatttcggatt
ttagaatttccaaattcaccagcgatttatcggttttggtgaaatccaaggatttattaatgtccacaaatgccatttgttttgt
ctgtggattgtatttgaaaatggaaacgatgtagttagatagatgcgctgcaaagtttcctattagggttccgcgctttacg
tcacccagcatacttgaatcaccatcctttaaaaaaaatgataagatatcaacatggagtatatcatactcggattttaat
tcttctactgcatcactgacattttcacaaatactacaatacggtttaccgaaaataatcagtacgttcttcatttatgggtat
caaaaacttaaaatcgttactgctggaaaataaatcactgacgatattagatgataatttatacaaagtatacaatgga
atatttgtggatacaatgagtatttatatagccgtcgccaattgtgtcagaaacttagaagagttaactacggtattcataa
aatacgtaaacggatgggtaaaaaagggagggcatgtaaccctttttatcgatagaggaagtataaaaattaaaca
agacgttagagacaagagacgtaaatattctaaattaaccaaggacagaaaaatgctagaattagaaaagtgtaca
tccgaaatacaaaatgttaccggatttatggaagaagaaataaaggcagaaatgcaattaaaaatcgataaactca
catttcaaatatatttatctgattctgataacataaaaatatcattgaatgagatactaacacatttcaacaataatgagaa
tgttacattattttattgtgatgaacgagacgcagaattcgttatgtgtctcgaggctaaaacacatttctctaccacagga
gaatggccgttgataataagtaccgatcaggatactatgctatttgcatctactgataatcatcctaagatgataaaaaa
cttaactcaactgtttaaatttgttccctcggcagaggataactatttagcaaaattaacggcgttagtgaatggatgtgat
ttctttcctggactctatggggcatctataacacccaccaacttaaacaaaatacaattgtttagtgattttacaatcgata
atatagtcactagtttggcaattaaaaattattatagaaagactaactctaccgtagacgtgcgtaatattgttacgtttata
aacgattacgctaatttagacgatgtctactcgtatgttcctccttgtcaatgcactgttcaagaatttatattttccg cattag
atgaaaaatggaacaattttaaatcatcttatttagagaccgttccgttaccctgccaattaatgtatgcattagaaccac
gcaaggagattgatgtttcagaagttaaaactttatcatcttatatagatttcgaaaatactaaatcagatatcgatgttata
aaatctatatcttcgatcttcggatattctaacgaaaactgtaacactatagtgttcggcatctataaggataatttactact
gagtataaatagttcattttactttaacgatagtctgttaataaccaatactaaaagtgataatataataaatataggttact
agattaaaaatggtgttccaactcgtgtgctctacgtgcggcaaagatatttctcacgaacgatataaattgattatacga
aaaaaatcattaaaggatgtactcgtcagtgtaaagaacgaatgttgtaggttaaaattatctacacaaatagaacctc
aacgtaacttaacagtgcaacctctattggatataaactaatatggatccggttaattttatcaagacatatgcgcctaga
ggttctattatttttattaattataccatgtcattaacaagtcatttgaatccatcgatagaaaaacatgtgggtatttattatgg
tacgttattatcggaacacttggtagttgaatctacctatagaaaaggagttcgaatagtcccattggatagtttttttgaag
gatatcttagtgcaaaagtatacatgttagagaatattcaagttatgaaaatagcagctgatacgtcattaactttattggg
tattccgtatggatttggtcataatagaatgtattgttttaaattggtagctgaatgttataaaaatgccggtattgatacatc
gtctaaacgaatattaggtaaagatatttttctgagccaaaacttcacagatgataatagatggataaagatatatgattc
taataatttaacattttggcaaattgattaccttaaagggtgagttaatatgcataactactcctccgttgttttttccctcgttct
ttttcttaacgttgtttgccatcactctcataatgtaaagatattctaaaatggtaaacttttgcatatcggacgcagaaattg
gtataaatgttgtaattgtattatttcccgtcaatggactagtcacagctccatcagttttatatcctttagagtatttctcactc
gtgtctaacattctagagcattccatgatctgtttatcgttgatattggccggaaagatagattttttattttttattatattactatt
ggcaattgtagatataacttctggtaaatatttttctaccttttcaatctcttctattttcaagccggctatatattctgctatattgt
tgctagtatcaataccttttctggctaagaagtcatatgtggtattcactatatcagttttaactggtagttccattagcctttcc
acttctgcagaataatcagaaattggttctttaccagaaaatccagctactataataggctcaccgatgatcattggcaa
aatcctatattgtaccagattaatgagagcatatttcatttccaataattctgctagttcttgagacattgatttatttgatgaat
ctagttggttctctagatactctaccatttctgccgcatacaataacttgttagataaaatcagggttatcaaagtgtttagc
gtggctagaatagtgggcttgcatgtattaaagaatgcggtagtatgagtaaaccgttttaacgaattatatagtctccag
aaatctgtggcgttacatacatgagccgaatgacatcgaagattgtccaatatttttaatagctgctctttgtccattatttct
atatttgactcgcaacaattgtagataccattaatcactgattcctttttcgatgccggacaatagcacaattgtttagctttg
gactctatgtattcagaattaatagatatatctctcaatacagattgcactatacattttgaaactatgtcaaaaattgtaga
acgacgctgttctgcagccatttaactttaaataatttacaaaaatttaaaatgagcatccgtataaaaatcgataaactg
cgccaaattgtggcatatttttcagagttcagtgaagaagtatctataaatgtagactcgacggatgagttaatgtatatttt
tgccgccttgggcggatctgtaaacatttgggccattatacctctcagtgcatcagtgttctaccgcggagccgaaaac
attgtgtttaatcttcctgtgtccaaggtaaaatcgtgtttgtgtagttttcacaatgatgccatcatagatatagaacctgatc
tggaaaataatctagtaaaactttctagttatcatgtagtaagtgtcgattgtaacaaggaactgatgcctattaggacag
atactactatttgtctaagtatagatcaaaagaaatcttacgtgtttaattttcacaagtatgaagaaaaatgttgtggtag
aaccgtcattcatttagaatggttgttgggctttatcaagtgtattagtcagcatcagcatttggctattatgtttaaagatga
caatattattatgaagactcctggtaatactgatgcgttttccagggaatattctatgactgaatgttctcaagaactacaa
aagttttctttcaaaatagctatctcgtctctcaacaaactacgaggattcaaaaagagagtcaatgtttttgaaactaga
atcgtaatggataatgacgataacattctaggaatgttgttttcggatagagttcaatcctttaagatcaacatctttatgac
gtttttagattaatactttcaatgagataaatatgggtggcagagtaagtgttgagctccctaaacgggatccgcctccgg
gagtacccactgatgagatgttattaaacgtggataaaatgcatgacgtgatagctcccgctaagcttttagaatatgtg
catataggaccactagcaaaagataaagaggataaagtaaagaaaagatatccagagtttagattagtcaacaca
ggacccggtggtctttcggcattgttaagacaatcgtataatggaaccgcacccaattgctgtcgcacttttaatcgtact
cattattggaaaaaggatggaaagatatcagataagtatgaagagggtgcagtattagaatcgtgttggccagacgtt
cacgacactggaaaatgcgatgttgatttattcgactggtgtcagggggatacgttcgatagaaacatatgccatcagt
ggatcggttcagcctttaataggagtgatagaactgtagagggtcaacaatcgttaataaatctgtataataagatgca
aacattatgtagtaaagatgctagtgtaccaatatgtgaatcatttttgcatcatttacgcgcacacaatacagaagata
gcaaagagatgatcgattatattctaagacaacagtctgcggactttaaacagaaatatatgagatgtagttatcccac
tagagataagttagaagagtcattaaaatatgcggaacctcgagaatgttgggatccagagtgttcgaatgccaatgtt
aatttcttactaacacgtaattataataatttaggactttgcaatattgtacgatgtaatactagcgtgaacaacttacagat
ggataaaacttcctcattaagattgtcatgtggattaagcaatagtgatagattttctactgttcccgtcaatagagcaaa
agtagttcaacataatattaaacattcgttcgacctaaaattgcatttgatcagtttattatctctcttggtaatatggatacta
attgtagctatttaaatgggtgccgcggcaagcatacagacgacggtgaatacactcagcgaacgtatctcgtctaaa
ttagaacaagaagcgaacgctagtgctcaaacaaaatgtgatatagaaatcggaaatttttatatccgacaaaacca
tggatgtaacctcactgttaaaaatatgtgctctgcggacgcggatgctcagttggatgctgtgttatcagccgctacag
aaacatatagtggattaacaccggaacaaaaagcatacgtaccagctatgtttactgctgcgttaaacattcagacga
gtgtaaacactgttgttagagattttgaaaattatgtgaaacagacttgtaattctagcgcggtcgtcgataacaaattaa
agatacaaaacgtaatcatagatgaatgttacggagccccaggatctccaacaaatttggaatttattaatacaggatc
tagcaaaggaaattgtgccattaaagcgttgatgcaattgacgactaaggccactactcaaatagcacctagacaag
ttgctggtacaggagttcagttttatatgattgttatcggtgttataatattggcagcgttgtttatgtactatgccaagcgtatg
ttgttcacatccaccaatgataaaatcaaacttattttagccaataaggaaaacgtccattggactacttacatggacac
attctttagaacttctccgatggttattgctaccacggatatgcaaaactgaaaatatattgataatattttaatagattaac
atggaagttatcgctgatcgtctagacgatatagtgaaacaaaatatagcggatgaaaaatttgtagattttgttatacac
ggtctagagcatcaatgtcctgctatacttcgaccattaattaggttgtttattgatatactattatttgttatagtaatttatatttt
tacggtacgtctagtaagtagaaattatcaaatgttgttggcgttggtggcgctagtcatcacattaactattttttattacttt
atactataatagtactagactgacttctaacaaacatctcacctgccataaataaatgcttgatattaaagtcttctatttct
aacactattccatctgtggaaaataatactctgacattatcgctaattgacacatcggtgagtgatatgcctataaagtaa
taatcttctttgggcacatataccagtgtaccaggttctaacaacctatttactggtgctcctgtagcatactttttctttacctt
gagaatatccatcgtttgcttggtcaatagcgatatgtgattttttatcaaccactcaaaaaagtaattggagtgttcatatc
ctctacgggctattgtctcatggccgtgtatgaaatttaagtaacacgactgtggtagatttgttctatagagccggttgcc
gcaaatagatagaactaccaatatgtctgtacaaatgttaaacattaattgattaacagaaaaaacaatgttcgttctgg
gaatagaaaccagatcaaaacaaaattcgttagaatatatgccacgtttatacatggaatataaaataactacagtttg
aaaaataacagtatcatttaaacatttaacttgcggggttaatttcacaactttactgtttttaaactgttcaaaatatagcat
cgatccatgagaaatacgtttagccgcctttaatagaggaaatcccaccgcctttctggatctcaccaacgacgatagt
tctgaccagcaacttatttcttcatcatccacctgttttaacatataataggcaggagatagatatccgtcattgcaatattc
cttttcgtaggcacacaatctaatattgataaaatctccattctcttctctgcatttattatcttgtttcggtggctgattaggctg
tagtcttggtttaggctttggtatatcgttgttgaatctattttggtcattaaatctttcatttcttcctggtatatttctatcacctcgtt
tggttggatttttgtctatattatcgtttgtaacatcggtacgggtattcatttatcacaaaaaaaacttctctaaatgagtcta
ctgctagaaaacctcatcgaagaagataccatattttttgcaggaagtatatctgagtatgatgatttacaaatggttattg
ccggcgcaaaatccaaatttccaagatctatgctttctatttttaatatagtacctagaacgatgtcaaaatatgagttgga
gttgattcataacgagaatatcacaggggcaatgtttaccacaatgtataatataagaaacaatttgggtctaggagat
gataaactaactattgaagccattgaaaactatttcttggatcctaacaatgaggttatgcctcttatcattaataatacgg
atatgactgccgtcattcctaaaaaaagtggtaggagaaagaataagaacatggttattttccgtcaaggatcatcacc
tatcttgtgtattttcgaaactcgtaaaaagattaatatttataaagaaaatatggaatccgcgtcgactgagtatacacct
atcggagacaacaaggctttgatatctaaatatgcgggaattaatgtcctgaatgtgtattctccttccacatccatgaga
ttgaatgccatttacggattcaccaataaaaataaactagagaaacttagtactaataaggaactagaatcgtatagtt
ctagccctcttcaagaacccattaggttaaatgattttctgggactattggaatgtgttaaaaagaatattcctctaacaga
tattccgacaaaggattgattactataaatggagaatgttcctaatgtatactttaatcctgtgtttatagagcccacgttta
aacattctttattaagtgtttataaacacagattaatagttttatttgaagtattcattgtattcattctaatatatgtattttttagat
ctgaattaaatatgttcttcatgcctaaacgaaaaatacccgatcctattgatagattacgacgtgctaatctagcgtgtg
aagacgataaattaatgatctatggattaccatggatgacaactcaaacatctgcgttatcaataaatagtaaaccgat
agtgtataaagattgtgcaaagcttttgcgatcaataaatggatcacaaccagtatctcttaacgatgttcttcgcagatg
atgattcattttttaagtatttggctagtcaagatgatgaatcttcattatctgatatattgcaaatcactcaatatctagacttt
ctgttattattattgatccaatcaaaaaataaattagaagccgtgggtcattgttatgaatctctttcagaggaatacagac
aattgacaaaattcacagactttcaagattttaaaaaactgtttaacaaggtccctattgttacagatggaagggtcaaa
cttaataaaggatatttgttcgactttgtgattagtttgatgcgattcaaaaaagaatcctctctagctaccaccgcaatag
atcctattagatacatagatcctcgtcgcgatatcgcattttctaacgtgatggatatattaaagtcgaataaagtgaaca
ataattaattctttattgtcatcatgaacggcggacatattcagttgataatcggccccatgttttcaggtaaaagtacaga
attaattagacgagttagacgttatcaaatagctcaatataaatgcgtgactataaaatattctaacgataatagatacg
gaacgggactatggacgcatgataagaataattttgaagcattggaagcaactaaactatgtgatgtcttggaatcaat
tacagatttctccgtgataggtatcgatgaaggacagttctttccagacattgttgaattctgtgagcgtatggcaaacga
aggaaaaatagttatagtagccgcactcgatgggacatttcaacgtaaaccgtttaataatattttgaatcttattccatta
tctgaaatggtggtaaaactaactgctgtgtgtatgaaatgctttaaggaggcttccttttctaaacgattgggtgaggaa
accgagatagagataataggaggtaatgatatgtatcaatcggtgtgtagaaagtgttacgtcggctcataatattatat
tttttatctaaaaaactaaaaataaacattgattaaattttaatataatacttaaaaatggatgttgtgtcgttagataaacc
gtttatgtattttgaggaaattgataatgagttagattacgaaccagaaagtgcaaatgaggtcgcaaaaaaactgccg
tatcaaggacagttaaaactattactaggagaattattttttcttagtaagttacagcgacacggtatattagatggtgcca
ccgtagtgtatataggatctgctcccggtacacatatacgttatttgagagatcatttctataatttaggagtgatcatcaaa
tggatgctaattgacggccgccatcatgatcctattttaaatggattgcgtgatgtgactctagtgactcggttcgttgatga
ggaatatctacgatccatcaaaaaacaactgcatccttctaagattattttaatttctgatgtgagatccaaacgaggag
gaaatgaacctagtacggcggatttactaagtaattacgctctacaaaatgtcatgattagtattttaaaccccgtggcgt
ctagtcttaaatggagatgcccgtttccagatcaatggatcaaggacttttatatcccacacggtaataaaatgttacaa
ccttttgctccttcatattcagctgaaatgagattattaagtatttataccggtgagaacatgagactgactcgagttacca
aatcagacgctgtaaattatgaaaaaaagatgtactaccttaataagatcgtccgtaacaaagtagttgttaactttgatt
atcctaatcaggaatatgactattttcacatgtactttatgctgaggaccgtgtactgcaataaaacatttcctactactaa
agcaaaggtactatttctacaacaatctatatttcgtttcttaaatattccaacaacatcaactgaaaaagttagtcatgaa
ccaatacaacgtaaaatatctagcaaaaattctatgtctaaaaacagaaatagcaagagatccgtacgcagtaataa
atagaaacgtactactgagatatactaccgatatagagtataatgatttagttactttaataaccgttagacataaaattg
attctatgaaaactgtgtttcaggtatttaacgaatcatccataaattatactccggttgatgatgattatggagaaccaat
cattataacatcgtatcttcaaaaaggtcataacaagtttcctgtaaattttctatacatagatgtggtaatatctgacttattt
cctagctttgttagactagatactacagaaactaatatagttaatagtgtactacaaacaggcgatggtaaaaagactc
ttcgtcttcccaaaatgttagagacggaaatagttgtcaagattctctaccgtcctaatataccattaaaaattgttagatttt
tccgcaataacatggtaactggagtagagatagccgatagatctgttatttcagtcgctgattaatcaattagtagagat
gagataagaacattataataatcaataatatattttatatcttatatcttgtttagaaaaatgctaatattaaaatagctaac
gctagtaatccaatcggaagccatttgatatctataatagggtatctaatttcctgattcagatagcggacagctatattct
cggtagctactcgtttggaatcacaaacattatttacatctaatttactatctgtaatggaaacgtttcccaatgaaatggta
caatccgatacattgcattttgttatatttttttttaaagaggctggtaacaacgcatcgcttcgtttacatggctcgtaccaa
caataatagggtaatcttgtatctattcctatccgtactatgcttttatcaggataaatacatttacatcgtatatcgtctttgtta
gcatcacagaatgcataaatttgttcgtccgtcatgataaaaatttaaagtgtaaatataactattattttatagttgtaataa
aaagggaaatttgattgtatactttcggttctttaaaagaaactgacttgataaaaatggctgtaatctctaaggttacgtat
agtctatatgatcaaaaagagattaatgctacagatattatcattagtcatgttaaaaatgacgacgatatcggtaccgtt
aaagatggtagactaggtgctatggatggggcattatgtaaaacttgtgggaaaacggaattggaatgtttcggtcact
ggggtaaagtaagtatttataaaactcatatagttaagcctgaatttatttcagaaattattcgtttactgaattatatatgtat
tcactgcggattattgcgttcacgagaaccgtattccgacgatattaacctaaaagagttatcgggacacgctcttagg
agattaaaggataaaatattatccaagaaaaagtcatgttggaacagtgaatgtatgcaaccgtatcaaaaaattactt
tttcaaagaaaaaggtttgtttcgtcaacaagttggatgatattaacgttcctaattctctcatctatcaaaagttaatttctat
tcatgaaaagttttggccattattagaaattcatcaatatccagctaacttattttatacagactactttcccatccctccgttg
attattagaccggctattagtttttggatagatagtatacccaaagaaaccaatgaattaacttacttattaggtatgatcgt
taagaattgtaacttgaatgctgatgaacaggttatccagaaggcggtaatagaatacgatgatattaaaattatttcta
ataacacttccagtatcaatttatcatatatcacatccggcaaaaataatatgattagaagttatatcgtcgcccggcga
aaagatcagaccgctagatctgtaattggtcccagtacatctatcaccgttaatgaggtaggaatgcccgcatatatta
gaaatacacttacagaaaagatatttgttaatgcctttacagtggataaagttaaacaactattagcgtcaaaccaagtt
aaattttactttaataaacgattaaaccaattaacaagaatacgccaaggaaagtttatcaaaaataaaatacatttatt
gcctggtgattgggtagaagtagctgttcaagaatatacaagtattatttttggaagacagccgtctctacatagataca
acgtcatcgcttcatctatcagagctaccgaaggagatactatcaaaatatctcccggaattgtcaactctcaaaatgct
gatttcgacggagatgaagaatggatgatattggagcaaaatcctaaagccgtaattgaacaaagtattcttatgtatc
cgacgacgttactcaaacacgatattcatggagcccccgtttatggatctattcaagatgaaatcgtagcagcgtattca
ttgtttaggatacaagatctttgtttagatgaagtattgaacatcttggggaaatatggaagagagttcgatcctaaaggt
aaatgtaaattcagcggtaaagatatctatacttacttgataggtgaaaagattaattatccgggtctcttaaaggatggt
gaaattattgcaaacgacgtagatagtaattttgttgtggctatgaggcatctgtcattggctggactcttatccgatcata
agtcgaacgtggaaggtatcaactttattatcaagtcatcttatgtttttaagagatatctatctatttacggttttggggtgac
attcaaagatctgagaccaaattcgacgttcactaataaattggaggccatcaacgtagaaaaaatagaacttatcaa
agaagcatacgccaaatatctcaacgatgtaagagacgggaaaatagttccattatctaaagctttagaggcggact
atgtggaatccatgttatccaacttgacaaatcttaatatccgagagatagaagaacatatgagacaaacgctgatag
atgatccagataataacctcctgaaaatggccaaagcgggttataaagtaaatcccacagaactaatgtatattctag
gtacttatggacaacagaggattgatggtgaaccagcagagactcgagtattgggtagagtcttaccttactatcttcca
gactctaaggatccagaaggaagaggttacattcttaattctttaacaaaaggattaacgggttctcaatattacttttcg
atgctggttgcaagatctcaatctactgatatcgtctgtgaaacatcacgtaccggaacactggctagaaaaatcatta
aaaagatggaggatatggtggtcgacggatacggacaagtagttataggtaatacgctcatcaagtacgccgccaa
ttataccaaaattctaggctcagtatgtaaacctgtagatcttatctatccagatgagtccatgacttggtatttggaaatta
gtgctctgtggaataaaataaaacagggattcgtttactctcagaaacagaaacttgcaaaaaagacattggcgccgt
ttaatttcctagtattcgtcaaacccaccactgaggataatgctattaaggttaaggatctgtacgatatgattcataacgt
cattgatgatgtgagagagaaatacttctttacggtatctaatatagattttatggagtatatattcttgacgcatcttaatcct
tctagaattagaattacaaaagaaacggctatcactatctttgaaaagttctatgaaaaactcaattatactctaggtggt
ggaactcctattggaattatttctgcacaggtattgtctgagaagtttacacaacaagccctgtccagttttcacactactg
aaaaaagtggtgccgtcaaacaaaaacttggtttcaacgagtttaataacttgactaatttgagtaagaataagaccg
aaattatcactctggtatccgatgatatctctaaacttcaatctgttaagattaatttcgaatttgtatgtttgggagaattaaa
tccaaacatcactcttcgaaaagaaacagataggtatgtagtagatataatagtcaatagattatacatcaagagagc
agaaattaccgaattagtcgtcgaatatatgattgaacgattcatctcctttagcgtcattgtaaaggaatggggtatgga
aacattcattgaggatgaggataatattagatttactgtctacctaaatttcgttgaaccggaagaattgaatcttagtaag
tttatgatggttcttccgggtgccgccaacaagggcaagattagtaaattcaagattcctatctctgattatacgggatatg
acgacttcaatcaaacaaaaaagctcaataagatgactgtagaactcatgaatctaaaagaattgggttctttcgattt
ggaaaacgtcaacgtgtatcctggagtatggaatacatacgatatcttcggtatcgaggccgctcgtgaatacttgtgc
gaagccatgttaaacacctatggagaagggttcgattatctgtatcagccttgtgatcttctcgctagtttactatgtgctag
ttacgaaccagaatcagtgaataaattcaagttcggcgcagctagtactcttaagagagctacgttcggagacaataa
agcattgttaaacgcggctcttcataaaaagtcagaacctattaacgataatagtagctgccacttttttagcaaggtcc
ctaatataggaactggatattacaaatactttatcgacttgggtcttctcatgagaatggaaaggaaactatctgataag
atatcttctcaaaagatcaaggaaatggaagaaacagaagacttttaattcttatcaataacatatttttctatgatctgtct
tttaaacgatggattttccacaaatgcgcctctcaagtccctcatagaatgatacacgtataaaaaatatagcataggc
aatgactccttatttttagacattagatatgccaaaatcatagccccgcttctatttactcccgcagcacaatgaaccaac
acgggctcgtttcgttgatcacatttagataaaaaggcggttacgtcgtcaaaatatttactaatatcggtagttgtatcatc
taccaacggtatatgaataatattaatattagagttaggtaatgtatatttatccatcgtcaaatttaaaacatatttgaactt
aacttcagatgatggtgcatccatagcatttttataatttcccaaatacacattattggttactcttgtcattatagtgggagat
ttggctttgtgcatatctccagttgaacgtagtagtaagtatttatacaaacttttcttatccatttataacgtacaaatggata
aaactactttatcggtaaacgcgtgtaatttagaatacgttagagaaaaggctatagtaggcgtacaagcagccaaa
acatcaacacttatattctttgttattatattggcaattagtgcgctattactctggtttcagacgtctgataatccagtctttaat
gaattaacgagatatatgcgaattaaaaatacggttaacgattggaaatcattaacggatagcaaaacaaaattaga
aagtgatagaggtagacttctagccgctggtaaggatgatatattcgaattcaaatgtgtggatttcggcgcctattttata
gctatgcgattggataagaaaacatatctgccgcaagctattaggcgaggtactggagacgcgtggatggttaaaaa
ggcggcaaaggtcgatccatctgctcaacaattttgtcagtatttgataaaacacaagtctaataatgttattacttgtggt
aatgagatgttaaatgaattaggttatagcggttattttatgtcaccgcattggtgttccgattttagtaatatggaatagtgtt
agataaatgcggtaacgaatgttcctgtaaggaaccataacagcttagatttaacgttaaagatgagcataaacataa
taaacaaaattacaatcaaacctataacattaatatcaaacaatccaaaaaatgaaatcagtggagtagtaaacgc
gtacataactcctggataacgtttagcagctgccgttcctattctagaccaaaaattcggtttcatgttttcgaaacggtatt
ctgcaacaagtcgaggatcgtgttctacatatttggcggcgttatccagtatctgcctattgatcttcatttcgttttcgattctg
gctatttcaaaataaaatcccgatgatagacctccagactttataatttcatctacgatgttcagcgccgtagtaactctaa
taatataggctgataagctaacatcataccctcctgtatatgtgaatatggcatgatttttgtccattacaagctcggttttaa
ctttattgcctgtaataatttctctcatctgtaggatatctatttttttgtcatgcattgccttcaagacgggacgaagaaacgt
aatatcctcaataacgttatcgttttctacaataactacatattctacctttttattttctaactcggtaaaaaaattagaatcc
catagggctaaatgtctagcgatatttcttttcgtttcctctgtacacatagtgttacaaaaccctgaaaagaagtgagtat
acttgtcatcatttctaatgtttcctccagtccactgtataaacgcataatccttgtaatgatctggatcatccttgactacca
caacatttcttttttctggcataacttcattgtcctttacatcatcgaacttctgatcattaatatgctcatgaacattaggaaat
gtttctgatggaggtctatcaataactggcacaacaataacaggagttttcaccgccgccatttagttattgaaattaatc
atatacaactctttaatacgagttatattttcgtctatccattgtttcacatttacatatttcgacaaaaagatataaaatgcgt
attccaatgcttctctgtttaatgaattactaaaatatacaaacacgtcactgtctggcaataaatgatatcttagaatattgt
aacaatttattttgtattgcacatgttcgtgatctatgagttcttcttcgaatggcataggatctccgaatctgaaaacgtata
aataggagttagaataataatatttgagagtattggtaatatataaactctttagcggtataattagtttttttctctcgatttct
atttttagatgtgatggaaaaatgactaattttgtagcattagtatcatgaactctaatcgagatcttaatatcttcgtcacac
gttagttctttgaagtttttaagagatgcatcagttggttcgaccgatggagtaggtgcaacaattttttgttcgatgtatgtat
gtactggagccattgtcttaactataatggtgcttgtatcgaaaaactttaatgcagataatggaagctcttcgccgcgac
tttctacatcgtaattgggttctaacgccgatctctgaatggatactagttttctaagttctaatgtgattctctgaaaatgtaa
atccaattcctccggcattatagatgtgtatacatcggtaaataaaactatagtatccaacgatcccttctcgcaaattcta
gtcttaaccaaaaaatcgtatataaccacggagatggcgtatttaagagtggattcttctaccgttttgttcttggatttcata
taagaaactataaagtccgcactactgttaagaatgattactaacgcaactatatagtttaaattaagcatcttggaaac
ataaaataactctgtagacgatacttgactttcgaataagtttgcagacaaacgaagaaagaacagacctctcttaattt
cagaagaaaactttttttcgtattcctgacgtctagagtttatatcaataagaaagttaagaattagtcggttaatgttgtattt
cattacccaagtttgagatttcataatattatcaaaagacatgataatattaaagataaagcgctgactatgaacgaaat
agctatatggttcgctcaagaatatagtcttgttaaacgtggaaacgataactgtatttttaatcacgtcagcggcatctaa
attaaatataggtatatttattccacacactctacaatatgccacaccatcttcataataaataaattcgttagcaaaattat
taattttagtgaaatagttagcgtcaactttcatagcttccttcaatctaatttgatgctcacacggtgcgaattccactctaa
catcccttttccatgcctcaggttcatcgatctctataatatctagttttttgcgtttcacaaacacaggctcgtctctcgcgat
gagatctgtatagtaactatgtaaatgataactagatagaaagatgtagctatatagatgacgatcctttaagagaggt
atgatgactttaccccaatcagatagactgttgttatggtcttcggaaaaagaatttttataaatttttccagtattttccaaat
atacgtacttaacatctaaaaaatccttaatgataataggaatggataatccgtctattttataaagaaatacatatcgca
cattatacttttttttggaaatgggaataccgatgtgtctacataaatatgcaaagtctaaatattttttagagaatcttagttg
gtccaaattcttttccaagtacggtaatagatttttcatattgaacggtatcttcttaatctctggttctagttccgcattaaatg
atgaaactaagtcactatttttataactaacgattacatcacctctaacatcatcatttaccagaatactgatcttcttttgtcg
taaatacatgtctaatgtgttaaaaaaaagatcatacaagttatacgtcatttcatctgtggtattcttgtcattgaaggata
aactcgtactaatctcttctttaacagcctgttcaaatttatatcctatatacgaaaaaatagcaaccagtgtttgatcatcc
gcgtcaatattctgttctatcgtagtgtataacaatcgtatatcttcttctgtgatagtcgatacgttataaaggttgataacg
aaaatatttttatttcgtgagataaagtcatcgtaggattttggacttatattcgcgtctagtagatatgcttttatttttggaatg
atctcaattagaatagtctctttagagtccatttaaagttacaaacaactaggaaattggtttatgatgtataatttttttagtttt
tatagattctttattctatacttaaaaaatgaaaataaatacaaaggttcttgagggttgtgttaaattgaaagcgagaaat
aatcataaattatttcattatcgcgatatccgttaagtttgtatcgtaatggcgtggtcaattacaaataaagcggatacta
gtagcttcacaaagatggctgaaatcagagctcatctaaaaaatagcgctgaaaataaagataaaaacgaggatat
tttcccggaagatgtaataattccatctactaagcccaaaaccaaacgagccactactcctcgtaaaccagcggctac
taaaagatcaaccaaaaaggaggaagtggaagaagaagtagttatagaggaatatcatcaaacaactgaaaaa
aattctccatctcctggagtcagcgacattgtagaaagcgtggctgctgtagagctcgatgatagcgacggggatgat
gaacctatggtacaagttgaagctggtaaagtaaatcatagtgctagaagcgatctttctgacctaaaggtggctaccg
acaatatcgttaaagatcttaagaaaattattactagaatctctgcagtatcgacggttctagaggatgttcaagcagct
ggtatctctagacaatttacttctatgactaaagctattacaacactatctgatctagtcaccgagggaaaatctaaagtt
gttcgtaaaaaagttaaaacttgtaagaagtaaatgcgtgcacttttttataaagatggtaaactctttaccgataataattt
tttaaatcctgtatcagacgataatccagcgtatgaggttttgcaacatgttaaaattcctactcatttaacagatgtagtag
tatatgaacaaacgtgggaggaggcgttaactagattaatttttgtgggaagtgattcaaaaggacgtagacaatactt
ttacggaaaaatgcatgtacagaatcgcaacgctaaaagagatcgtatttttgttagagtatataacgttatgaaacga
attaattgttttataaacaaaaatataaagaaatcgtccacagattccaattatcagttggcggtttttatgttaatggaaac
tatgttttttattagatttggtaaaatgaaatatcttaaggagaatgaaacagtagggttattaacactaaaaaataaaca
catagaaataagtcccgatgaaatagttatcaagtttgtaggaaaggacaaagtttcacatgaatttgttgttcataagtc
taatagactatataaaccgctattgaaactgacggatgattctagtcccgaagaatttctgttcaacaaactaagtgaac
gaaaggtatacgaatgtatcaaacagtttggtattagaatcaaggatctccgaacgtatggagtcaattatacgtttttat
ataatttttggacaaatgtaaagtccatatctcctcttccgtcaccaaaaaagttaatagcgttaactatcaaacaaactg
ctgaagtggtaggtcatactccatcaatttcaaaaagagcttatatggcaacgactattttagaaatggtaaaggataa
aaattttttagatgtagtatctaaaactacgttcgatgaattcctatctatagtcgtagatcacgttaaatcatctacggatg
gatgatatagatctttacacaaataattacaagaccgataaatggaaatggataagcgtatgaaatctctcgcaatga
cagctttcttcggagagctaaacacattagatattatggcattgataatgtctatatttaaacgccatccaaacaatacca
ttttttcagtggataaggatggtcagtttatgattgatttcgaatacgataattataaggcttctcaatatttggatctgaccct
cactccgatatctggagatgaatgcaagactcacgcatcgagtatagccgaacaattggcgtgtgtggatattattaaa
gaggatattagcgaatatatcaaaactactccccgtcttaaacgatttataaaaaaataccgcaatagatcagatactc
gtatcagtcgagatacagaaaagcttaaaatagctctagctaaaggcatagattacgaatatataaaagacgcttgtt
aataagtaaatgaaaaaaaactagtcgtttataataaaacacaatatggatgccaacatagtatcatcttctactattgc
aacgtatatagacgctttagcgaagaatgcttcagaattagaacagaggtctaccgcatacgaaataaataatgaatt
ggaactagtatttattaagccgccattaattactttgacaaatgtagtgaatatctctacgattcaggaatcgtttattcgatt
taccgttactaataaggaaggtgttaaaattagaactaagattccattatctaaggtacatggtctagatgtaaaaaatgt
acagttagtagatgctatagataacatagtttgggaaaagaaatcattagtgacggaaaatcgtcttcacaaagaatg
cttgttgagactatcgacagaggaacgtcatatatttttggattacaagaaatatggatcctctatccgactagaattagtc
aatcttattcaagcaaaaacaaaaaactttacgatagactttaagctaaaatattttctaggatccggtgcccagtctaa
aagttctttattacacgctattaatcatccaaagtcaaggcctaatacatctctggaaatagaattcacacctagagaca
atgaaaaagttccatatgatgaactaataaaggaattgacgactctatcacgtcatatatttatggcttctccagagaat
gtaattctttctccgcctattaacgcgcctataaaaacctttatgttgcctaaacaagatatagtaggtttggatctggaaa
atctatatgccgtaactaagactgacggaattcctataactatcagagttacatcaaaagggttgtattgttattttacacat
cttggttatattattagatatcctgttaagagaataatagattccgaagtagtagtctttggtgaggcagttaaggataaga
actggaccgtatatctcattaagctaatagagcctgtgaatgcaatcaatgatagactagaagaaagtaagtatgttga
atctaaactagtggatatttgtgatcggatagtattcaagtcaaagaaatacgaaggtccgtttactacaactagtgaag
tcgtcgatatgttatctacatatttaccaaagcaaccagaaggtgttattctgttctattcaaagggacctaaatctaacatt
gattttaaaattaaaaaggaaaatactatagaccaaactgcaaatgtagtatttaggtacatgtccagtgaaccaattat
ctttggagaatcgtctatctttgtagagtataagaaatttagcaacgataaaggctttcctaaagaatatggttctggtaag
attgtgttatataacggcgttaattatctaaataatatctattgtttggaatatattaatacacataatgaagtgggtattaagt
ccgtggttgtacctattaagtttatagcagaattcttagttaatggagaaatacttaaacctagaattgataaaaccatga
aatatattaactcagaagattattatggaaatcaacataatatcatagtcgaacatttaagagatcaaagcatcaaaat
aggagatatctttaacgaggataaactatcggatgtgggacatcaatacgccaataatgataaatttagattaaatcca
gaagttagttattttacgaataaacgaactagaggaccgttgggaattttatcaaactacgtcaagactcttcttatttctat
gtattgttccaaaacatttttagacgattccaacaaacgaaaggtattggcgattgattttggaaacggtgcggacctgg
aaaaatacttttatggagagattgcgttattggtagcgacggatccggatgctgatgctatagctagaggaaatgaaag
atacaacaaattaaactctggaattaaaaccaagtactacaaatttgactacattcaggaaactattcgatccgataca
tttgtctctagtgtcagagaagtattctattttggaaagtttaatatcatcgactggcagtttgctatccattattcttttcatccg
agacattatgctaccgtcatgaataacttatccgaactaactgcttctggaggcaaggtattaatcactaccatggacg
gagacaaattatcaaaattaacagataaaaagacttttataattcataagaatttacctagtagcgaaaactatatgtct
gtagaaaaaatagctgatgatagaatagtggtatataatccatcaacaatgtctactccaatgactgaatacattatca
aaaagaacgatatagtcagagtgtttaacgaatacggatttgttcttgtagataacgttgatttcgctacaattatagaac
gaagtaaaaagtttattaatggcgcatctacaatggaagatagaccgtctacaaaaaactttttcgaactaaatagag
gagccattaaatgtgaaggtttagatgtcgaagacttacttagttactatgttgtttatgtcttttctaagcggtaaataataat
atggtatgggttctgatatccccgttctaaatgcattaaataattccaatagagcgatttttgttcctataggaccttccaact
gtggatactctgtattgttaatagatatattaatacttttgtcgggtaacagaggttctacgtcttctaaaaataaaagtttgat
aacatctggcctgttcataaataaaaacttggcgattctatatatactcttattatcaaatctagccattgtcttatagatgtg
agctactgtaggtgtaccatttgattttctttctaatactatatatttctctcgaagaagttcttgcacatcatctgggaataaa
atactactgttgagtaaatcagttattttttttatatcgatattgatggacatttttatagttaaggataataagtatcccaaagt
cgataacgacgataacgaagtatttatacttttaggaaatcacaatgactttatcagatcaaaattaacaaaattaaag
gagcatgtatttttttctgaatatattgtgactccagatacatatggatctttatgcgtcgaattaaatgggtctagttttcagc
acggtggtagatatatagaggtggaggaatttatagatgctggaagacaagttagatggtgttctacatccaatcatat
atctgaagatatgcacactgataaatttgtcatttatgatatttatacgtttgattcgttcaagaataaacgattggtatttgta
caggtgcctccatcattaggagatgatagctatttgactaatccgttattgtctccgtattatcgtaattcagtagccagac
aaatggtcaatgatatgatttttaatcaagattcatttttaaaatatttattagaacatctgattagaagccactatagagtttc
taaacatataacaatagttagatacaaggataccgaagaattaaatctaacgagaatatgttataatagagataagttt
aaggcgtttgtattcgcttggtttaacggcgtttcggaaaatgaaaaggtactagatacgtataaaaaggtatctaatttg
atataatgaattcagtgactgtatcacacgcgccatatactattacttatcacgatgattgggaaccagtaatgagtcaat
tggtagagttttataacgaagtagccagttggctgctacgagacgagacgtcgcctattcctgataagttctttatacagtt
gaaacaaccgcttagaaataaacgagtatgtgtgtgtggtatagatccgtatccgaaagatggaactggtgtaccgtt
cgaatcaccaaattttacaaaaaaatcaattaaggagatagcttcatctatatctagattaaccggagtaattgattata
aaggttataaccttaatataatagacggggttataccctggaattattacttaagttgtaaattaggagaaacaaaaagt
cacgcgatctactgggataagatttccaagttactgctgcagcatataactaaacacgttagtgttctttattgtttgggtaa
aacagatttctcgaatatacgggcaaagttagaatccccggtaactaccatagtcggatatcatccagcggctagag
accgccaattcgagaaagatagatcatttgaaattatcaacgttttactggaattagacaacaaggcacctataaattg
ggctcaagggtttatttattaatgctttagtgaaattttaacttgtgttctaaatggatgcaactattagaggtaatgatgttat
ctttgttcttaagactataggtgtcccgtcagcgtgcagacaaaatgaagatccaagatttgtagaagcatttaaatgcg
acgagttagaaagatatattgagaataatccagaatgtacactattcgaaagtcttagggatgaggaagcatactctat
agtcagaattttcatggatgtagatttagacgcgtgtctagacgaaatagattatttaacggctattcaagattttattatcg
aggtgtcaaactgtgtagctagattcgcgtttacagaatgcggtgccattcatgaaaatgtaataaaatccatgagatct
aatttttcattgactaagtctacaaatagagataaaacaagttttcatattatctttttagacacgtataccactatggatac
attgatagctatgaaacgaacactattagaattaagtagatcatctgaaaatccactaaccagatcgatagacactgc
cgtatataggagaaaaacaactcttcgggttgtaggtactaggaaaaatccaaattgcgacactattcatgtaatgca
accaccgcatgataatatagaagattacctattcacttacgtggatatgaacaacaatagttattacttttctctacaacg
acgattggaggatttagttcctgataagttatgggaaccagggtttatttcattcgaagacgctataaaaagagtttcaaa
aatattcattaattctataataaactttaatgatctcgatgaaaataattttacaacggtaccactggtcatagattacgtaa
caccttgtgcattatgtaaaaaacgatcgcataaacatccgcatcaactatcgttggaaaatggtgctattagaatttac
aaaactggtaatccacatagttgtaaagttaaaattgttccgttggatggtaataaactgtttaatattgcacaaagaatttt
agacactaactctgttttattaaccgaacgaggagaccatatagtttggattaataattcatggaaatttaacagcgaag
aacccttgataacaaaactaattctgtcaataagacatcaactacctaaggaatattcaagcgaattactctgtccgag
gaaacgaaagactgtagaagctaacatacgagacatgttaatagattcagtggagaccgatacctatccggataaa
cttccgtttaaaaatggtgtattggacctggtagacggaatgttttactctggagatgatgctaaaaaatatacgtgtactg
tatcaaccggatttaaatttgacgatacaaagttcgtcgaagacagtccagaaatggaagagttaatgaatatcattaa
cgatatccaaccattaacggatgaaaataagaaaaatagagagttgtacgaaaaaactttatctagttgtttatgcggt
gctaccaaaggatgtttaacattcttttttggagaaactgcaactggaaagtcgacaaccaaacgtttgttaaagtctgct
atcggtgacctgtttgttgagacgggtcaaacaattttaacagatgtattggataaaggacctaatccatttatcgctaac
atgcatttgaaaagatctgtattctgtagcgaactacctgattttgcctgtagtggatcaaagaaaattagatctgacaat
attaaaaagttgacagaaccttgtgtcattggaagaccgtgtttctccaataaaattaataatagaaaccatgcgacaa
tcattatcgatactaattacaaacctgtctttgataggatagataacgcattaatgagaagaattgccgtcgtgcgattca
gaacacacttttctcaaccttctggtagagaggctgctgaaaataatgacgcgtacgataaagtcaaactattagacg
aggggttagatggtaaaatacaaaataatagatatagattcgcatttctatacttgttggtgaaatggtacaaaaaatat
catgttcctattatgaaactatatcctacaccggaagagattccggactttgcattctatctcaaaataggtactctgttagt
atctagctctgtaaagcatattccattaatgacggacctctccaaaaagggatatatattgtacgataatgtggttactctt
ccgttgactactttccaacagaaaatatccaagtattttaattctagactatttggacacgatatagagagcttcatcaata
gacataagaaatttgccaatgttagtgatgaatatctgcaatatatattcatagaggatatttcatctccgtaaatatatgct
catatatttatagaagatatcacatatctaaatgaataccggaatcatagatttatttgataatcatgttgatagtataccaa
ctatattacctcatcagttagctactctagattatctagttagaactatcatagatgagaacagaagcgtgttattgttccat
attatgggatcaggtaaaacaataatcgctttgttgttcgccttggtagcttccagatttaaaaaggtttacattctagtgcct
aatattaacattttgaaaatttttaattataatatgggtgtagctatgaacttgtttaatgacgaattcatagctgagaatatct
ttattcattccacaacaagtttttattctcttaattataacgataacgtcattaattataacggattatctcgctacaataactct
atttttatcgttgatgaggcacataatatctttgggaataatactggagaacttatgaccgtgataaaaaataaaaacaa
gattccttttttactattgtctggatctcccattactaacacacctaatactctgggtcatattatagatttaatgtccgaagag
acgatagattttggtgaaattattagtcgtggtaagaaagtaattcagacacttcttaacgaacgaggtgtgaatgtactt
aaggatttgcttaaaggaagaatatcatattacgaaatgcctgataaagatctaccaacgataagatatcacggacgt
aagtttctagatactagagtagtatattgtcacatgtctaaacttcaagagagagattatatgattactagacgacagcta
tgttatcatgaaatgtttgataaaaatatgtataacgtgtcaatggcagtattgggacaacttaatctgatgaataatttag
atactttatttcaggaacaggataaggaattgtacccaaatctgaaaataaataatggcgtgttatacggagaagaatt
ggtaacgttaaacattagttccaaatttaaatactttattaatcggatacagacactcaacggaaaacattttatatactttt
ctaattctacatatggcggattggtaattaaatatatcatgctcagtaatggatattctgaatataatggttctcagggaact
aatccacatatgataaacggcaaaccaaaaacatttgctatcgttactagtaaaatgaaatcgtctttagaggatctatt
agatgtgtataattctcctgaaaacgatgatggcagtcaattgatgtttttgttttcgtcaaacattatgtccgaatcctatact
ctgaaagaggtaaggcatatttggtttatgactatcccagatactttttctcaatacaaccaaattcttggacgatctattag
aaaattctcttacgccgatatttctgaaccagttaatgtatatcttttagccgccgtatattccgatttcaatgacgaagtga
cgtcattaaacgattacacacaggatgaattaattaatgttttaccatttgacatcaaaaagctgttgtatctaaaatttaa
gactaaagaaacgaatagaatatactctattcttcaagagatgtctgaaacgtattctcttccaccacatccatcaattgt
aaaagttttattgggagaattggtcagacaatttttttataataattctcgtattaagtataacgataccaagttacttaaaat
ggttacatcagttataaaaaataaagaagacgctaggaattacatagatgatattgtaaacggtcacttctttgtatcga
ataaagtatttgataaatctcttttatacaaatacgaaaacgatattattacagtaccgtttagactttcctacgaaccatttg
tttggggagttaactttcgtaaagaatataacgtggtatcttctccataaaactgatgagatatataaagaaataaatgtc
gagctttgttaccaatggataccttccagttacattggagccacacgagctgacgttagacataaaaactaatattagg
aatgccgtatataagacgtatctccatagagaaattagtggtaaaatggccaagaaaatagaaattcgtgaagacgt
ggaattacctctcggcgaaatagttaataattctgtagttataaacgttccgtgtgtaataacctacgcgtattatcacgttg
gggatatagtcagaggaacattaaacatcgaagatgaatcaaatgtaactattcaatgtggagatttaatctgtaaact
aagtagagattcgggtactgtatcatttagcgattcaaagtactgcttttttcgaaatggtaatgcgtatgacaatggcag
cgaagtcactgccgttctaatggaggctcaacaaggtatcgaatctagttttgtttttctcgcgaatatcgttgactcataa
aaaagagaatagcggtaagtataaacacgaatactatggcaataattgcgaatgttttattcccttcgatatatttttgata
atatgaaaaacatgtctctctcaaatcggacaaccatctcataaaatagttctcgcgcgctggagaggtagttgctgctc
gtataatctccccagaataatatacttgcgtgtcgtcgttcaatttatacggatttctatagttctctgttatataatgcggttttc
catcatgattagacgacgacaatagtgttctaaatttagatagttgatcagaatgaatgtttattggcgttggaaaaattat
ccatacagcgtctgcagagtggttgatagttgttcctagatatgtaaaataatccaacttactaggcagcaaattgtctag
ataaaatactgaatcaaacggtgcagacgtattggtggatctaatggaatccaattgattaactatcttttgaaaatatac
atttttatgatccgatacttgtaagaatatagaaataatgataagtccatcatcgtgtttttttgcctcttcataagaactatatt
ttttcttattccaatgaacaagattaatctctccagagtatttgtacacatctatcaagtgattggatccataatcgtcttccttt
ccccaatatatacgtagtgatgataacacatattcattggggagaaaccctccacttatatatcctcctttaaaattaatcc
ttactagttttccagtgttctggatagtggttggtttcgactcattataatgtatgtctaacggcttcaatcgcgcgttagaaatt
gcttttttagtttctatattaataggagatagttgttgcggcatagtaaaaatgaaatgataactgtttaaaaatagctcttag
tatgggaattacaatggatgaggaagtgatatttgaaactcctagagaattaatatctattaaacgaataaaagatattc
caagatcaaaagacacgcatgtgtttgctgcgtgtataacaagtgacggatatccgttaataggagctagaagaactt
cattcgcattccaagcgatattatctcaacaaaattcagattctatctttagagtatccactaaactattacggtttatgtact
acaatgaactaagagaaatctttagacggttgagaaaaggttctatcaacgatatcgatcctcactttgaagagttaat
attattgggtggtaaactagataaaaaggaatctattaaagattgtttaagaagagaattaaaagaggaaagtgatga
acgtataacagtaaaagaatttggaaatgtaattctaaaacttacaacacgggataaattatttaataaagtatatataa
gttattgcatggcgtgttttattaatcaatcgttggaggatttatcgcatactagtatttacaatgtagaaattagaaagatta
aatcattaaatgattgtattaacgacgataaatacgaatatctgtcttatatttataatatgctagttaatagtaaatgaactt
ttacagatctagtataattagtcagattattaagtataatagacgactagctaagtctattatttgcgaggatgactctcaa
attattacactcacggcattcgttaaccaatgcctatggtgtcataaacgagtatccgtgtccgctattttattaactactgat
aacaaaatattagtatgtaacagacgagatagttttctctattctgaaataattagaactagaaacatgtctagaaagaa
acgattatttctgaattattccaattatttgtccaaacaggaaagaagtatactatcgtcatttttttctctagatccagctact
actgataatgatagaatagatgctatttatccgggtggcatacccaaaaggggtgagaatgttccagagtgtttatcca
gggaaattaaagaagaagttaatatagacaattcttttgtattcatagacactcggttttttattcatggcatcatagaagat
accattattaataaattttttgaggtaatcttctttgtcggaagaatatctttaacgagtgatcaaatcattgatacatttaaaa
gtaatcatgaaatcaaggatctaatatttttagatccgaattcaggtaatggactccaatacgaaattgcaaaatatgct
ctagatactgcaaaactcaaatgttatggccatagaggatgttattacgaatcattaaaaaaattaactgaggatgattg
attagaaaatataaattaatttaccatcgtgtatttttataacgggattgtccggcatatcatgtagatagttaccgtctacat
cgtatactcgaccatctacgcctttaaatcctctatttattgacattaatctattagaattggaataccaaatattagtaccct
caattagtttattggtaatattttttttagacgatagatcgatggctcttgaaaccaaggttttccaaccggactcattgtcgat
cggtgagaagtctttttcattagcatgaatccattctaatgatgtatgtttaaacactctaaacaattggacaaattcttttga
tttgctttgaatgatttcaaataggtcttcgtctacagtaggcataccattagataatctagccattataaagtgcacgtttac
atatctacgttctggaggagtaagaacgtgactattgagacgaatggctcttcctactatctgacgaagagacgcctcg
ttccatgtcatatctaaaatgaagatatcattaattgagaaaaaactaataccctcgcctccactagaagagaatacgc
atgttttaatgcattctccgttagtgtttgattcttggttaaactcagccaccgccttgattctagtatcttttgttctagatgaga
actctatattagagataccaaagactttgaaatatagtaataagatttctattcctgactgattaacaaatggttcaaaga
ctagacatttaccatgggatgctaatattcccaaacatacatctataaatttgacgcttttctcttttaattcagtaaatagag
agatatcagccgcactagcatcccctttcaatagttctccctttttaaaggtatctaatgcggatttagaaaactctctatct
cttaatgaatttttaaaatcattatatagtgttgctatctcttgcgcgtattcgcccggatcacgattttgtctttcaggaaagct
atcgaacgtaaacgtagtagccatacgtctcagaattctaaatgatgatatacctgtttttatttcagcgagtttagccttttg
ataaatttcttcttgctttttcgacatattaacgtatcgcattaatactgttttcttagcgaatgatgcagacccttctacgtcatc
aaaaatagaaaactcgttattaactatgtacgaacataggcctcctagtttggagactaattctttctcatcaactagacg
tttattctcaaatagcgattggtgttgtaaggatcctggtcgtagtaagttaaccaacatggtgaattcttgcacactattaa
cgataggtgtagccgataaacaaatcatcttatggttttttaatgcgatggtcttagataaaaaattatatactgaacgagt
aggacggatcttaccatcttctttgattaatgatttagaaatgaagttatgacattcatcaataatgacgcatattctactctt
ggaattaatagttttgatattagtaaaaaatttatttctaaaattttgatcatcgtaattaataaaaatacaatccttcgttatct
ctggagcgtatctgagtatagtgttcatccaaggatcttctatcaaagcctttttcaccaataagataatagcccaattcgt
ataaatatccttaagatgtttgagaatatatacagtagtcattgttttaccaacacccgtttcatggaacaataaaagaga
atgcatactgtctaatcctaagaaaactcttgctacaaaatgttgataatccttgaggcgtactacgtctgttcccatcattt
caacaggcatattagtagttctgcgcaatgcataatcgatataggccgcgtgtgatttactcatttatgagtgataagtaa
taactatgttttaaaaatcacagcagtagtttaactagtcttctctgatgtttgttttcgatactttttgaatcagaagtcatact
agaataaagcaacgagtgaacgtaatagagagcttcgtatactctattcgaaaactctaagaacttattaatgaattcc
gtatccactggattgtttaaaatactaaattgaacactgttcacatccttccaagaagaagacttagtgacggacttaac
atgagacataaataaatccaaattttttttacaaacatcactagccaccataatggcgctatctttcaaccagctatcgctt
acgcattttagcagtctaacatttttaaagagactacaatatattctcatagtatcgattacacctctaccgaataaagttg
gaagtttaataatacaatatttttcgtttacaaaatcaaataatggtcgaaacacgtcgaaggttaacatcttataatcgct
aatgtatagattgttttcagtgagatgattattagatttaatagcatctcgttcacgtttgaacagtttattgtgtgcgctgaggt
cggcaactacggcgtccgctttagtactcctcccataatactttacgctattaatctttaaaatttcatagactttatctagat
cgctttctggtaacatgatatcatgtgtaaaaagttttaacatgtcggtcggcattctatttagatcattaactctagaaatct
gaagaaagtaattagctccgtattccagactaggtaatgggcttttacctaaagacaagttaagttctggcaatgtttcat
aaaatggaagaaggacatgcgttccctcccggatattttttacaatttcatccatttacaactctatagtttgttttcattattat
tagttattatctcccataatcttggtaatacttaccccttgatcgtaagataccttatacaggtcattacatacaactaccaat
tgtttttgtacataatagattggatggttgacatccatggtggaataaactactcgaacagatagtttatctttccccctagat
acattggccgtaatagttgtcggcctaaagaatatctttggtgtaaagttaaaagttagggttcttgttccattattgctttttgt
cagtagttcattataaattctcgagatgggtccgttctctgaatatagaacatcatttccaaatctaacttctagtctagaaa
taatatcggtcttattcttaaaatctattcccttgatgaagggatcgttaatgaacaaatccttggcctttgattcggctgatct
attatctccgttatagacgttacgttgactagtccaaagacttacaggaatagatgtatcgatgatgttgatactatgtgat
atgtgagcaaagattgttctcttagtggcatcactatatgttccagtaatggcggaaaactttttagaaatgttatatataaa
agaattttttcgtgttccaaacattagcagattagtatgaagataaacactcatattatcaggaacattatcaatttttacat
acacatcagcatcttgaatagaaacgataccatcttctggaacctcaacaatctcggcagactccggataaccagtc
ggtgggccatcactaacaataactagatcatccaacaatctactcacatatgcatctatataatctttttcatcttgtgagta
ccctggatacgaaataaatttattatccgtatttccataataaggtttagtataaacagagagcgatgttgccgcatgaac
ttcagttacagtcgccgttggttggtttatttgacctattactctcctaggtttctctataaacgatggtttaatttgtacattctta
accatatatccaataaagctcaattcaggaacataaacaaattctttgttgaacgtttcaaagtcgaacgaagagtcac
gaataacgatatcggatactggattgaaggttaccgttacggtaatttttgaatcggatagtttaagactgctgaatgtatc
ttccacatcaaacggagttttaatataaacgtatactgtagatggttctttaatagtgtcattaggagttaggccaatagaa
atatcattaagttcactagaatatccagagtgtttcaaagcaattgtattattgatacaattattatataattcttcgccctcaa
tttcccaaataacaccgttacacgaagagatagatacgtgattaatacatttatatccaacatatggtacgtaaccgaat
cttcccatacctttaacttctggaagttccaaactcagaaccaaatgattaagcgcagtaatatactgatccctaatttcg
aagctagcgatagcctgattgtctggaccatcgtttgtcataactccggatagagaaatatattgcggcatatacaaagt
tggaatttgactatcgactgcgaagacattagaccgtttaatagagtcatccccaccgatcaaagaattaatgatagtat
tattcattttctatttaaaatggaaaaagcttacaataaactccgtagagaaatatctataatttgtgagttttccttaaagta
acagcttccgtaaacgccgtctttatctcttagtaggtttattgtatttatgaccttttccttatcttcatagaatactaaaggca
acaaagaaatttttggttcttctctaagagctacgtgagacttaaccatagaagccaacgaatccctacatattttagaa
cagaaatacccaacttcaccacccttgaatgtctcaatactaataggtctaaaaaccaaatcttgattacaaaaccaa
cacttatcaattacactatttgtcttaatagacacatctgccatagatttataatactttggtagtatacaagcgagtgcttctt
ctttagcgggcttaaagactgctttaggtgctgaaataaccacatctggaaggcttactcgcttagccatttaattacgga
actatttttttatacttctaatgagcaagtagaaaacctctcatctacaaaaacatactcgtgtccataatcctctaccatag
ttacacgttttttagatctcatatgtgctaaaaagttttcccatactaattggttactattatttttcgtataatttttaacagtttga
ggttttagatttttagttacagaagtgatatcgaatattttatccaaaaagaatgaataattaattgtcttagaaggagtgtttt
cttggcaaaagaataccaagtgcttaaatatttctactacttcattaatcttttctgtactcagattcagtttctcatcttttactt
gattgattatttcaaagactaacttataatcctttttatttattctctcgttagccttaagaaaactagatacaaaatttgcatct
acatcatccgtggatatttgatttttttccatgatatccaagagttccgagataatttctccagaacattgatgagacaataa
tctccgcaatacatttctcaaatgaataagtttattagacacatggaagtttgactttttttgtacctttgtacatttttgaaatac
agactcgcaaaaaatacaatattcatatccttgttcagatactataccgttgtgtctacaaccgctacataatcgtagattc
atgttaacactctacgtatctcgtcgtccaatattttatataaaaacattttatttctagacgttgccagaaaatcctgtaatat
ttttagttttttgggctgtgaataaagtatcgccctaatatggttaccgtcctccgccaatatagtagttaaattatccgcaca
tgcagaagaacaccgcttaggcggattcagtacaatgttatatttttcgtaccaactcatttaaatatcataatctaaaata
gttctgtaatatgtctagcgctaatatattgatcataatcctgtgcataaattaagatacaacaatgtctcgaaatcatcga
catggcttcttccatagttagaagatcgtcgtcaaagttagcaacgtgattcatcaacatttgctgttttgaggcagcaaat
actgaaccgtcgccattcaaccattcataaaaaccatcgtctgaatccattgataatttcttgtactggtttttgagagctcg
catcaatctagcatttctagctcccggattgaaaacagaaagaggatcgtacatccagggtccattttctgtaaataga
atcgtataatgtcccttcaagaagatatcagacgatccacaatcaaagaattggtctccgagtttgtaacaaactgcgg
actttaacctatacatgataccgtttagcatgatttctggtgatacgtcaatcggagtatcatctattagagatctaaagcc
ggtgtaacattctccaccaaacatattcttattctgacgtcgttctacataaaacatcattgctccattaacgataacaggg
gaatgaacagcactacccatcacattagttcccaatggatcaatgtgtgtaactccagaacatcttccatatcctatgtta
ggaggagcgaacaccactcttccactattgccatcgaatgccatagaataaatatccttggaattgatagaaatcgga
ctgtcggatgttgtgatcatcttcataggattaacaactatgtatggtgccgcctgaagtttcatatcgtaactgatgccgttt
ataggtctagccacagaaaccaacgtaggtctaaatccaactatagacaaaatagaagccaatatctgttcttcatct
gtcataacttgagagcatccagtatgaataatcttcattagatggggatctaccgcatcatcatcgttacaataaaaaatt
cccattctaatgttcataattgcttttctaatcatggtatgcatgtttgctctctgaatctctgtggaaattagatctgatacacc
tgtaatcactatcggattatcctccgtaagacgattaaccaacaacatataattataagactttacttttctaaattcataaa
gttgctggattaggctataggtgtctccatgtacatacgcgttctcgagcgcaggaagtttaataccgaatagtgccatc
agaataggatgaatatagtaattagtttctggttttctataaataaaagacaaatcttgtgaactagacatatcggtaaaa
tgcatggattggaatcgtgtagtcgacagaagaatatgatgattagatggagagtatattttatctaactctttgagttggt
caccgattctaggactagctcgagaatgaataagtactaaaggatgagtacatttcacagaaacactagcattgttca
atgtgctctttacatgggtaaggagttgaaatagctcgtttctatttgttctgacaatatttagtttattcataatgttaagcatat
cctgaatagtaaagttagatgtgtcatacttgttagtagttagatatttagcaattgcattcccatcatttctcaatctcgtact
ccaatcatgcgtggatgctacttcgtcgatggaaaccatacaatcctttttgataggctgttgagattgattatttcctgcac
gtttaggtttggtacgttgatttctagcccctgcggatataaagtcatcgtctacaattttggataatgaattgcatacactac
aagacaaagatttatcagaagtgtgaatatgatcttcatctaccaaagaaagagtttgattagtataactagattttagtc
ctgcgttagatgttaaaaaaacatcgctattgaccacggcttccattatttatattcgtagtttttactcgaaagcgtgatttta
atattcaatcttattacttttggaatcgttcaaaacctttgactaattgtagaatttgatctattgccctacgcgtatactccctt
gcatcatatacgttcgtcaccagatcgtttgtttcggcctgaagttggtgcatatctctttcaacattcgacatgagatcctta
agggccatatcgtctagattttgttgagatgctgctcctggatttggattttgttgtgctgttgtacatactgtaccaccagtag
gtgtaggagtacatacagtggccacaataggaggttgaggaggtgtaaccgttggagtagtacaagaaatacttcca
tccgattgttgtgtacatgtagttgttggtaacgtctgagaaggttgggtagatggcggcgtcgtcgtcttttgatctttattaa
atttagagataatatcctgaacagcattgctcggcgtcaacgctggaaggagtgaactcgccggcgcatcagtatctg
cagacagccaatcaaaaagattagacatatcagatgatgtattagtttgttgtcgtggttttggtgtaggagccggtgtag
ctgttggaaccggctgtggagttatatgaatagttggttgtagcggttggataggctgtctgctggcggccatcatattatc
tctagctagttgttctcgcaactgtctttgataatacgactcttgagactttagtcctatttcaatcgcttcatcctttttcgtatcc
ggatccttttcttcagaataatagattgacgactttggtgtagaggattctgccagcccctgtgagaacttgttaaagaagt
ccatttaaggctttaaaattgaattgcgattataagattaaatggcagacacagacgatattatcgactatgaatccgat
gatctcaccgaatacgaggatgatgaagaagaggaagaagatggagagtcactagaaactagtgatatagatccc
aaatcttcttataagattgtagaatcagcatccactcatatagaagatgcgcattccaatcttaaacatatagggaatcat
atatctgctcttaaacgacgctatactagacgtataagtctatttgaaatagcgggtataatagcagaaagctataactt
gcttcaacgaggaagattacctctagtttcagaattttctgacgaaacgatgaagcaaaatatgctacatgtaattatac
aagagatagaggagggttcttgtcctatagtcatcgaaaagaacggagaattgttgtcggtaaacgattttgacaaag
atggtctaaaattccatctagactatattatcaaaatttggaaacttcaaaaacgatattagaatttatacgaatatcgttct
ctaaatgtcacaatcaagtctcgcatgttcagcaatttattgtcgtactttatatcgtgttcattaacgatatcttgcaaaata
gtaatgattctatcttccttcgatagatattcttcagagattattgtcttatattctttcttgttatcagatatgaatttgataagact
ttgaacattattgatacccgtctgtttaattttttctacagatattttagttttggcagattctatcgtatctgtcaatagacatcca
acatcgacattcgacgtcaattgtctataaatcaacgtataaattttagaaataacattagcgaattgttgtgcattgatgt
cgttattctgaaacagtatgattttaggtagcattttcttaacaaagagaacgtatttattgttactcagttgaacagatgata
tatccagattactaacgcatctgattccatataccaaactttcagaagaaatggtgtacaattgtttgtattcattcaatgtct
ctttttcagaaattagtttagagtcgaatactgcaataattttcaagagatagttttcatcagataagattttatttagtgtaga
tatgataaaactattgttttgttggagaacttgatacgccgcgttctctgtagtcgacgctctcaaatgggaaacaatctcc
attatttttttggaatcggatacaatatcttcggtatcttgacgcaatctagtatacatagagttaagagaaattagagtttgt
acattaagcaacatgtctctaaatgtggctgcaaacttttccttttccacatcatctagtttattatataccgatttcacaacg
gcaccagatttaaggaaccagaatgaaaaactctgataactacaatatttcatcatagttacgattttatcatcttctatag
ttggtgtaatagcgcatacctttttctccaagactggaaccaacgtcataaaaatgtttaaatcaaaatccatatcaacat
ctgatgcgctaagaccagtctcgcgttcaagattatctttactaatggtgacgaactcatcgtatagaactctaagtttgtc
cattatttatttacagatttagttgtttaatttatttgtgctcttccagagttgggatagtatttttctaacgtcggtattatattattag
gatctacgttcatatgtatcataatattaatcatccacgttttgataaatctatctttagcttctgaaataacgtatttaaacaa
aggagaaaaatatttagctacggcatcagacgcaataacattttttgtaaatgtaacgtatttagacgacagatcttcgtt
aaaaagttttccatctatgtagaatccatcggttgttaacaccattcccgcgtcagattgaataggagtttgaatagtttgttt
tggaaatagatccttcaataacttatagttgggtgggaaaaaatcgattttatcactagactctttcttttttactatcattacct
catgaactatttcttgaatgagtatatgtattttctttcctatatcggacgcgttcattggaaaatataccatgtcgttaactata
agaatatttttatcctcgtttacaaactgaataatatcagatgtagttcgtaaacgaactatatcatcaccagcacaacat
ctaactatatgatatccactagtttcctttagtcgtttattatcttgttccatattagcagtcattccatcatttaagaaggcgtc
aaagataatagggagaaatgacattttggattctgttacaactttaccaaaattaaggatatacggacttactatctttttct
caacgtcgatttgatgaacacacgatgaaaatgtacttcgatgagattgatcatgtagaaaacaacaagggatacaa
tatttccacatatcatgaaatatattaagaaatcccaccttattatatttccccaaaggatccatgcatgtaaacattatgcc
gttatcattaataaagacttctttctcatcggatctgtaaaagttgttactgatttttttcattccaggatctagataattaataat
gatgggttttctattcttattctttgtattttggcatatcctagaccagtaaacagtttccactttggtaaaatcagcagacttttg
aacgctattaaacatggcattaatggcaataactaaaaatgtaaaatatttttctatgttaggaatatggtttttcactttaat
agatatatggtttttggccaaaatgatagatatttttttatccgaggatagtaaaatattattagtcgccgtctctataaaaat
gaagctagtctcgatatccaattttattctagaattgataggagtcgccaaatgtaccttatacgttatatctcccttgatgc
gttccatttgtgtatctatatcggacacaagatctgtaaatagttttacgttattaatcatcacggtatcgccgtcgctagata
acgctaatgtaccatccaagtcccaaatggagagatttaactgttcatcgtttagaataaaatgattaccggtcatattaa
taaagtgttcatcgtatctagataacaacgacttataattaatgtccaagtcttgaactcgctgaatgatcttttttaaccca
gttagttttagattggtacgaaatatattgttaaactttgattctacagtaatgtccaaatctagttgtggaaatacttccatca
acattgtttcaaacttgataatattattatctacatcttcatacgatccaaattccggaatagatgtatcgcacgctctggcc
acccagataaccaaaaagtcacacgctccaggatatacattgtataaaaagctatcgttttttagtagtgtttttttctgagt
atatacgaagggattaaaaatagtattatcaacgtaactatattccaaattattcttatgagaatagataataatatcgtcc
ttaatatctaacaaatttcctaaatatccctttaattgagtcattcgaagcgtcaatagaatatgtctcttaactatttccggct
gttgtatatttaaatgacttcgtaaaaaataatatatgggcgacttctcatctatgtaatcatatggagtgagatatagggct
cgttctacctcctgccccttacccacctgtaataccaattgcggacttactatatatcgcatatttatatcgtggggtaaagt
gaaaatctactaccgatgatgtaagtcttacaatgttcgaaccagtaccagatcttaatttggaggcctccgtagaacta
ggggaggtaaatatagatcaaacaacacctatgataaaggaaaatagcggttttatatcccgtagtagacgtctattc
gcccatagatctaaggatgatgagagaaaactagcactacgattctttttacaaagactttattttttagatcatagagag
attcattatttgttcagatgcgttgacgctgtaaaagacgtcactattaccaaaaaaaataacattatcgtggcgccttata
tagcacttttaactatcgcatcaaaaggatgcaaacttacagaaacaatgattgaagcattctttccagaactatataat
gaacatagtaagaaatttaaattcaactctcaagtatccatcatccaagaaaaactcggataccagtttggaaactatc
acgtttatgattttgaaccgtattactctacagtagctctggctattcgagatgaacattcatctggcatttttaatatccgtca
agagagttatctggtaagttcattatctgaaataacatatagattttatctaattaatctaaaatctgatcttgttcaatggagt
gctagtacgggcgctgtaattaatcaaatggtaaatactgtattgattacagtgtatgaaaagttacaactggtcataga
aaatgattcacaatttacatgttcattggctgtggaatcaaaacttccaataaaattacttaaagatagaaatgaattattt
acaaaattcatcaacgagttaaaaaagaccagttcattcaagataagcaaacgcgataaggatacgctactaaaat
attttacttaggactggagttagaatttatagacgactcatttcgtttatcattattagtattcttcttgttatcttgttcagaaatat
acagcaatgctatgcctaatactaaatacattatcatgcttgcaatggctctaacaacgacgaaccaaaatgaatttgg
tcgtagcttttgttcacaaaaatacataaagaaatgtctacataaatctatggcgccattggctacttgaaatagcgcca
gtcctcctacagattttaatatagctgtataacatgacatttattcatcatcaaaagagacagagtcaccatctgtcatattt
agattttttttcatgtgttcaaagtatcctctactcatttcattataatagtttatcatacttagaattttaggacggatcaatgag
taagacttgactagatcgtcagtagtaatttgtgcatcgtctattctgcatccgcttcgtcgaataatgtatagcatcgctttg
agattctccatagctatcaagtctttatacaatgacatggaaatatctgtgaatactttatacttctccaacatcgatgcctt
aacatcatcgcctactttagcattgaaaatacgttctattgtgtagatggatgtagcaagatttttaaacaacaatgccattt
tacacgatgattgcctcaagtctccaatcgtttgtttagaacgattagctacagagtccaatgcttggctgactagcatatt
attatctttagaaattgtattcttcaatgaggcgtttatcatatctgtgatttcgttagtcatattacagtctgactgggttgtaat
gttatccaacatatcacctatggatacggtacacgtaccagcatttgtaataatcctatctaagatgttgtatggcattgcg
cagaaaatatcttctcctgtaatatttccactctcgataaatctactcagattattcttaaatgccttattctctggagaaaag
atatcagtgtccatcatttcattaatagtatacgcagaaaagataccacgagtatcaattctatccaagatacttatcggtt
ccgagtcacagataatggtttcctctccttcgggagatcctgcatagaaatatctaggacaatagtttctatactgtctgta
actctgataatctctaaagtcactaactgataccatgaaattgagaagatcaaacgctgaagtaattaatttttctgcctc
gtttttactacaactagttttcatcaatgtagtgacgatgtattgtttagttactcttggtctaatactgatgatagagatattatt
acttcccataatggatcttctagtagtcaccttaaagcccattgatgcaaatagcagatagataaagtcttggtatgactc
ctttctaatatagtacggactacctttgtcacccaactttatacccacataagccataacaacctctttaatagccgtttcat
gaggtttatcagccatgagcctgagtagttggaagaatctcatgaatcctgtctcagaaagtcctatatgcatgatagatt
tatctttcctgggaaactctcgtatagtcatagatgaaatactcttcaaagtttctgaaataagattagtaacagtcttacct
ccgactactctaggtaacaaacaaactctaataggtgttttctctgcggagataatatcagaaaggatagagcaataa
gtagtattattgtgattataaagaccgaatacataacaggtagaatttataaacatcatgtcctgaaggtttttagacttgta
ttcctcgtaatccataccgtcccaaaacatggatttggtaactttgatagccgtagatctttgttccttcgccaacaggttaa
agaaattaataaagaatttgtggtttctacctatgtctacaaattgcacgtttggaagcgccacggttacattcactgcag
cattttgaggatcgcgagtatgaagtacgatgttattgtttactggtatatctggaaagaattctaccagtctaggaataag
agattgatatcgcatagaaatacaaaagttcataatctcatcatctaagagcattttgttaccattgtaataaatatccact
ctgtcatatgtataaatgaagtactgttcaaacatgatgagatgtttatatgttggcatagtagtgagatctacgtttggtaa
tggcaatgtattaagattaactccataatgtctagcagcatctgcgatgttataagcgttgtcaaagcggggtcgatcttgt
gctgttatatattgtctaacacctataagattatcaaaatcttgtctgcttaatacaccgttaacaatttttgccttgaattctttt
attggtgcattaataacatccttatagaggatgttaaacaaataagtgttatcaaagttaagatctggatatttcttttctgct
agaacatccattgagtcggagccatctggtttaatataaccaccgataaatctagctctgtattctgtatccgtcaatctaa
tattaagaaggtgttgagtgaaaggtggaagatcgtaaaagctgtgagtattaatgataggattagtttccgaactaatg
ttaattggggtattaataatatctatatttccagcgttaagtgtaacattaaacagttttaattcacgtgacgtggtatcaatta
aataattaatgcccaatttggatatagcagcctgaagctcatcttgtttagttacggatcctaatgagttattaagcaatat
atcgaacggatgaacgaaggttgttttaagttggtcacatactttgtaatctagacatagatgcggaagaacggtagaa
actatacgaaataaatattcagagtcctctaattgatcaagagtaactattgacttaataggcatcatttatttagtattaaa
tgacgaccgtaccagtgacggatatacaaaacgatttaattacagagttttcagaagataattatccatctaacaaaaa
ttatgaaataactcttcgtcaaatgtctattctaactcacgttaacaacgtggtagatagagaacataatgccgccgtagt
gtcatctccagaggaaatatcctcacaacttaatgaagatctatttccagatgatgattctccggccactattatcgaacg
agtacaacctcatactactattattgacgatactccacctcctacgtttcgtagagagttattgatatcggaacaacgtca
acaacgagaaaaaagatttaatattacagtatcgaaaaatgctgaagcaataatggaatctagatctatgatatcttct
atgccaacacaaacaccatccttgggagtagtttatgataaagataaaagaattcagatgttggaggatgaagtggtt
aatcttagaaatcaacgatctaatacaaaatcatctgataatttagataattttaccagaatactatttggtaagactccgt
ataaatcaacagaagttaataagcgtatagccatcgttaattatgcaaatttgaacgggtctcccttatcagtcgaggac
ttggatgtttgttcagaggatgaaatagatagaatctataaaacgattaaacaatatcacgaaagtagaaaacgaaa
aattatcgtcactaacgtgattattattgtcataaatattatcgagcaagcattgctaaaactcggatttgaagaaatcaa
aggactgagtaccgatatcacttcagaaattatcgatgtggagatcggagatgactgcgatgctgtagcatcaaaact
aggaatcggtaacagtccggttcttaatattgtattgtttatactcaagatattcgttaaacgaattaaaattatttaatttaat
acattcccatatccagacaacaatcgtctggattaatctgttcctgtcgtctcataccggacgacatattaatctttttattag
taggcatctttttagatggtttctttttcccagcattaactgagtcgatacctagaagatcgtgattgatctctccgaccattcc
acgaacttctaattggccgtctctgacggtaccataaactattttaccagcattagtaacagcttggacaatctgaccatc
catcgcattgtacgatgtagtagtaactgttgttctacgtctaggagcaccagaagtatttttggagcccttggatgttgatg
tagaagaagacgaggattttgattttggtttacatgtaatacattttgtatcacatgcgccggcagtcacatctgtttgaga
attaagattattgttgcctcctttgacggctgcatctccaccgatttgcgctagtagatttttaagctgtggtgtaatcttattaa
ctgtttcgatataatcatcgtaactgcttctaacggctaaattttttttatccgccatttagaagctaaaaatatttttatttatgc
agaagatttaactagattatacaatgaactaatatgatccttttccagattatttacaaacttggtattttttggttctggagga
ggcgaatttaaattcggacttggatttggattttgtgggttcttgatcttattatacagcgcatataggatggcgacggtaac
tgctacgcaaataccgatcaacaaaagaataccaatcatttattgacaataacttcactattgatcaagtatgcaatata
tcatcttttcactaaataagtagtaataatgattcaacaatgtcgagatatatggacgataataatttagttcatggaaatat
cgctatgattggtatgaatgactccgctaactctgtggggcgcgcagtgctttccccacatagaataaattagcattccg
actgtgataataataccaagtataaacgccataatactcaatactttccatgtacgagtgggactggtagacttactaaa
gtcaataaaggcgaagatacacgaaagaatcaaaagaatgattccagcgattagcacgccggaaaaataatttcc
aatcataagcatcatatccatttaactaataaaaattttaaatcgccgaatgaacaaagtggaatataaaccatataaa
aacaatagtttgtactgcaaaaataatatctatttttgttttcgaagatatggtaaaattaaatagtagtacacagcatgtta
taactaacagcagcaacggctcgtaattacttatcatttactagacgaaaaggtggtgggatattttcttgctcaaataat
acgaatatatcacccatccattttatgcgatgtttatatactctaatctttaatagatctatagacgacgggtttaccaacaa
tatagattttatcgattcatctaatttaaacccttccttaaacgtgaatgatctattatctggcataacgatgactctacccga
tgaatcggacaatgtactgggccatgtagaataaattatcaacgaattatcgtctacgaacatttatatcatttgttttaattt
tagtacgcgaataaatagatataaaatagaaaataacagatattacaaccaatgttatggccgcgcccggccggcc
gcggccgctttttttctagacactaaataaatagtaagattaaattaattataaaattatgtatataatattaattataaaatt
atgtatatgatttactaactttagttagataaattaataatacataaattttagtatattaatattataaattaataatacataaa
ttttagtatattaatattatattttaaatatttatttagtgtctagaaaaaaaggcctagcaggcc

[0073] Sequence of sMVA fragment 3 (F3, 62068 bp in length) (SEQ ID NO: 14):

ggcctagcaggcctttttttctagacactaaataaatagtaagattaaattaattataaaattatgtatataatattaattata
aaattatgtatatgatttactaactttagttagataaattaataatacataaattttagtatattaatattataaattaataatac
ataaattttagtatattaatattatattttaaatatttatttagtgtctagaaaaaaaggccggccgggtattaataatatctat
atttccagcgttaagtgtaacattaaacagttttaattcacgtgacgtggtatcaattaaataattaatgcccaatttggata
tagcagcctgaagctcatcttgtttagttacggatcctaatgagttattaagcaatatatcgaacggatgaacgaaggtt
gttttaagttggtcacatactttgtaatctagacatagatgcggaagaacggtagaaactatacgaaataaatattcaga
gtcctctaattgatcaagagtaactattgacttaataggcatcatttatttagtattaaatgacgaccgtaccagtgacgga
tatacaaaacgatttaattacagagttttcagaagataattatccatctaacaaaaattatgaaataactcttcgtcaaat
gtctattctaactcacgttaacaacgtggtagatagagaacataatgccgccgtagtgtcatctccagaggaaatatcc
tcacaacttaatgaagatctatttccagatgatgattctccggccactattatcgaacgagtacaacctcatactactatta
ttgacgatactccacctcctacgtttcgtagagagttattgatatcggaacaacgtcaacaacgagaaaaaagatttaa
tattacagtatcgaaaaatgctgaagcaataatggaatctagatctatgatatcttctatgccaacacaaacaccatcct
tgggagtagtttatgataaagataaaagaattcagatgttggaggatgaagtggttaatcttagaaatcaacgatctaat
acaaaatcatctgataatttagataattttaccagaatactatttggtaagactccgtataaatcaacagaagttaataag
cgtatagccatcgttaattatgcaaatttgaacgggtctcccttatcagtcgaggacttggatgtttgttcagaggatgaaa
tagatagaatctataaaacgattaaacaatatcacgaaagtagaaaacgaaaaattatcgtcactaacgtgattattat
tgtcataaatattatcgagcaagcattgctaaaactcggatttgaagaaatcaaaggactgagtaccgatatcacttca
gaaattatcgatgtggagatcggagatgactgcgatgctgtagcatcaaaactaggaatcggtaacagtccggttctt
aatattgtattgtttatactcaagatattcgttaaacgaattaaaattatttaatttaatacattcccatatccagacaacaat
cgtctggattaatctgttcctgtcgtctcataccggacgacatattaatctttttattagtaggcatctttttagatggtttctttttc
ccagcattaactgagtcgatacctagaagatcgtgattgatctctccgaccattccacgaacttctaattggccgtctctg
acggtaccataaactattttaccagcattagtaacagcttggacaatctgaccatccatcgcattgtacgatgtagtagt
aactgttgttctacgtctaggagcaccagaagtatttttggagcccttggatgttgatgtagaagaagacgaggattttga
ttttggtttacatgtaatacattttgtatcacatgcgccggcagtcacatctgtttgagaattaagattattgttgcctcctttga
cggctgcatctccaccgatttgcgctagtagatttttaagctgtggtgtaatcttattaactgtttcgatataatcatcgtaact
gcttctaacggctaaattttttttatccgccatttagaagctaaaaatatttttatttatgcagaagatttaactagattataca
atgaactaatatgatccttttccagattatttacaaacttggtattttttggttctggaggaggcgaatttaaattcggacttgg
atttggattttgtgggttcttgatcttattatacagcgcatataggatggcgacggtaactgctacgcaaataccgatcaac
aaaagaataccaatcatttattgacaataacttcactattgatcaagtatgcaatatatcatcttttcactaaataagtagt
aataatgattcaacaatgtcgagatatatggacgataataatttagttcatggaaatatcgctatgattggtatgaatgac
tccgctaactctgtggggcgcgcagtgctttccccacatagaataaattagcattccgactgtgataataataccaagta
taaacgccataatactcaatactttccatgtacgagtgggactggtagacttactaaagtcaataaaggcgaagatac
acgaaagaatcaaaagaatgattccagcgattagcacgccggaaaaataatttccaatcataagcatcatatccattt
aactaataaaaattttaaatcgccgaatgaacaaagtggaatataaaccatataaaaacaatagtttgtactgcaaaa
ataatatctatttttgttttcgaagatatggtaaaattaaatagtagtacacagcatgttataactaacagcagcaacggct
cgtaattacttatcatttactagacgaaaaggtggtgggatattttcttgctcaaataatacgaatatatcacccatccatttt
atgcgatgtttatatactctaatctttaatagatctatagacgacgggtttaccaacaatatagattttatcgattcatctaatt
taaacccttccttaaacgtgaatgatctattatctggcataacgatgactctacccgatgaatcggacaatgtactgggc
catgtagaataaattatcaacgaattatcgtctacgaacatttatatcatttgttttaattttagtacgcgaataaatagatat
aaaatagaaaataacagatattacaaccaatgttatggccgcgcccaaccaggtaggcagttttattttatcttttactac
aggttctcctggatgtacgtcaccaacggcggacgtagttctagtacaattagacgtaagttccgcttgggaattttttaa
cgctaaagagttaacgttaatcgtgcacccaacgtatttacatctagttctttgaacatcttgattataatataaccattttct
atctctagattcgtcggtgcactcatgtaaccaacataccctaggtcctaaatatttatctccggaattagattttggataat
tcgcgcaccaacaatttctatttcctttatgatcgttacaaaagacgtataatgccgtatccccaaaagtaaaataatcag
gacgaataattctaataaactcagaacaatatctcgcatccatatgtttggagcaaatatcggaataagtagacatagc
cggtttccgttttgcacgtaaccattctaaacaattggggtttccaggatcgtttctacaaaatccagtcatgaaatcatca
caatgttctgtcttgtaattattattaaatatttttggacagtgtttggtatttgtcttagaacaacattttgccacgctatcactat
cgcccaggagataatccttttttataaaatgacatcgttgcccggatgctatataatcagtagcgtgttttaaatccttaata
tattcaggagttacctcgttctgataatagattaatgatccaggacgaaatttgaaagaactacatggttctccatgaatt
aatacatattgtttagcaaattcaggaactataaaactactacaatgatctatcgacataccatctatcaaacaaaactt
gggtttaatttctcccggagatgtttcataatagtacgtataactttcttctgcaaacttaacagctctattatattcaggataa
ttaaaacctaattccatatatttgtctcgtatatctgctattcctggtgctattttgattctattaagagtaacggctgcccccatt
tttaataatcgtcagtatttaaactgttaaatgttggtatatcaacatttaccttatttcccgcagtataaggtttgttgcaggta
tactgttcaggaatggttacatttatactttttctatagtcctgtctttcgatgttcatcacatatgcaaagaacagaataaac
aaaataatgtaagaaataatattaaatatctgtgaattcgtaaatacattgattgccataataattacagcagctacaata
catacaatagacattcccacagtgttgccattacctccacgatacatttgagttactaagcaataggtaataactaagct
agtaagaggcaatagaaaagatgagataaatatcatcaatatagagattagaggagggctatatagagccaagac
gaacaaaatcaaaccgagtaacgttctaacatcattatttttgaagattcccaaataatcattcattcctccataatcgtttt
gcatcatacctccatctttaggcataaacgattgctgctgttcctctgtaaataaatctttatcaagcactccagcacccgc
agagaagtcgtcaagcatattgtaatatcttaaataactcatttatatattaaaaaatgtcactattaaagatggagtata
atctttatgccgaactaaaaaaaatgacttgtggtcaacccctaagtctttttaacgaagacggggatttcgtagaagttg
aaccgggatcatcctttaagtttctgatacctaagggattttacgcctctccttccgtaaagacgagtctagtatttgaaac
attaacaacgaccgataataaaattactagtatcaatccaacaaatgcgccaaagttatatcctcttcaacgcaaagtc
gtatctgaagtagtttctaatatgaggaaaatgatcgaatcaaaacgtcctctatacatcactcttcacttggcgtgtggat
ttggtaagactattaccacgtgttatcttatggctacacacggtagaaaaaccgtcatttgcgtacccaataaaatgttaa
tacatcaatggaagacacaggtagaggcagtcggattggaacataagatatccatagatggagtaagtagtctatta
aaggaactaaagactcaaagtccggatgtattaatagtagtcagtagacatctgacaaacgatgccttttgtaaatata
tcaataagcattatgatttgttcatcttggatgaatcacatacgtataatctgatgaacaatacagcagttacaagattttta
gcgtattatcctccgatgatgtgttattttttaactgctacacctagaccatctaacagaatttattgtaacagtattattaatat
tgccaagttatccgatctaaaaaaaactatctatgcagtagatagtttttttgagccatattccacagataatattagacat
atgataaaacgattagatggaccatctaataaatatcatatatataccgagaagttattatctgtagacgagcctagaa
atcaacttattcttaataccctggtagaagaattcaagtcaggaactattaatcgcattttagttattactaaactacgtgaa
catatggtattcttctacaaacgattattagattttttcggatcagaggttgtatttataggagacgcccaaaatagacgta
ctccagatatggtcaaatcaatcaaggaactaaatagatttatattcgtatccaccttattttattccggtactggtttagata
ttcctagtttggattctttgttcatttgctcggcagtaatcaacaatatgcaaatagagcaattactagggagggtatgtcg
agaaacagaactattagataggacggtatatgtatttcctagcacatccatcaaagaaataaagtacatgataggaa
atttcgttcaacgaattattagtctgtctgtagataaactaggatttaaacaaaaaagttatcggaaacatcaagaatcc
gatcccacttctgtatgtacaacatcctccagagaagaacgtgtattaaatagaatatttaactcgcaaaatcgttaaga
agtttaagcgacgatccgcatgctgcgcaggccagtgtattacccctcatagtattaatataatccaatgatacttttgtg
atgtcggaaatcttaaccaatttagactgacaggcagaacacgtcatgcaatcatcatcgtcatcgataactgtagtctt
gggcttctttttgcggctcttcattccggaacgcacattggtgctatccatttaggtagtaaaaaataagtcagaatatgcc
ctatagcacgatcgtgcaaaacctggtatatcgtctctatctttatcacaatatagtgtatcgacatctttattattattgacct
cgtttatcttggaacatggaatgggaacatttttgttatcaacggccacctttgccttaattccagatgttgtaaaattataac
taaacagtctatcatcgacacaaatgaaattcttgtttagacgtttgtagtttacgtatgcggctcgttcgcgtctcattttttc
agatattgcaggtactataatattaaaaataagaatgaaataacataggattaaaaataaagttatcatgacttctagc
gctgatttaactaacttaaaagaattacttagtctgtacaaaagtttgaaattttcagattctgcggctatagaaaagtata
attctttggtagaatggggaacatctacttactggaaaataggcgtgcaaaaggtagctaatgtcgagacgtcaatatc
tgattattatgatgaggtaaaaaataaaccgtttaatattgatccgggctattacattttcttaccggtatattttgggagcgt
ctttatttattcgaagggtaaaaatatggtagaacttggatctggaaactcttttcaaataccagatgatatgcgaagtgc
gtgtaacaaagtattagacagcgataacggaatagactttctgagatttgttttgttaaacaatagatggataatggaag
atgctatatcaaaatatcagtctccagttaatatatttaaactagctagtgagtacggattaaacatacccaaatatttag
aaattgaaatagaggaagacacattatttgacgacgagttatactctattatagaacgctctttcgatgataaatttccaa
aaatatccatatcgtatattaagttgggagaacttaggcggcaagttgtagactttttcaaattctcattcatgtatattgagt
ccatcaaggtagatcgtataggagataatatttttattcctagcgttataacaaaatcaggaaaaaagatattagtaaaa
gatgtagaccatttaatacgatccaaggttagagaacatacatttgtaaaagtaaaaaagaaaaacacattttccatttt
atacgactatgatggaaacggaacagaaactagaggagaagtaataaaacgaattatagacactataggacgag
actattatgttaacggaaagtatttctctaaggttggtagtgcaggcttaaagcaattgactaataaattagatattaatga
gtgcgcaactgtcgatgagttagttgatgagattaataaatccggaactgtaaaacgaaaaataaaaaaccaatcag
catttgatttaagcagagaatgtttgggatatccagaagcggattttataacgttagttaataacatgcggttcaaaatag
aaaattgtaaggttgtaaatttcaatattgaaaatactaattgtttaaataacccgagtattgagactatatatggaaacttt
aaccagttcgtctcaatctttaatatcgtcaccgatgtcaaaaaaagattattcgagtgaaataatatgcgcctttgatata
ggtgcaaaaaatcctgccagaactgttttagaagtcaaggataactccgttagggtattggatatatcaaaattagact
ggagttctgattgggaaaggcacatagctaaagatttgtcacaatatgaatacactacagttcttctagaacgtcagcct
agaaggtcgccgtacgtcaaatttatctattttattaaaggctttttatatcatacatcggctgccaaagttatttgcgtctcg
cctgtcatgtctggtaattcatatagagatcgaaaaaagagatcggtcgaagcatttcttgattggatggacacattcgg
attgcgagactccgttccggatagacgcaaattagacgatgtagcggatagtttcaatttggctatgagatacgtattag
ataaatggaatactaattatacaccttataataggtgtaaatctagaaattacataaaaaaaatgtaataacgttagtaa
cgccattatggataatctatttacctttctacatgaaatagaagatagatatgccagaactatttttaactttcatctaataag
ttgcgatgaaataggagatatatatggtcttatgaaagaacgcatttcctcagaggatatgtttgataatatagtgtataat
aaagatatacatcatgccattaagaaactagtgtattgcgacatccaacttactaaacacattattaatcagaatacgta
tccggtatttaacgattcttcacaagtgaaatgttgtcattatttcgatataaactcagataatagcaatattagctctcgtac
agtagagatatttgagagggaaaagtcatctcttgtatcatatattaaaactaccaataagaagagaaaggtcaattat
ggggaaataaagaaaactgtacatggaggcactaatgcaaattacttttccggtaaaaagtctgatgagtatctgagc
actacagtcaggtccaacattaatcaaccttggatcaaaaccatttctaagagaatgagagtagatatcattaatcact
ctatagtaacgcgtggaaaaagctctatattacaaactatagaaattatttttactaatagaacatgtgtgaaaatattca
aggattctactatgcacattattctatccaaggacaaggatgaaaaggggtgtatacacatgattgacaaattattctat
gtctattataatttatttctgttgttcgaggatatcatccaaaacgagtactttaaagaagtagctaatgttgtaaaccacgt
actcacggctacggcattagatgagaaattattcctaattaagaaaatggctgaacacgatgtttatggagttagcaatt
tcaaaatagggatgtttaacctgacatttattaagtcgttggatcataccgttttcccctctctgttagatgaggatagcaaa
ataaagttttttaaggggaaaaagctcaatattgtagcattacgatctctggaggattgtataaattacgtgactaaatcc
gagaatatgatagaaatgatgaaggaaagatcgactattttaaatagcatagatatagaaacggaatcggtagatcg
tctaaaagaattgcttctaaaatgaaaaaaaaacactaattcagaaatggatcaacgactcggatataagtttttggtg
cctgatcctaaagccggagttttttatagaccgttacatttccaatatgtatcgtattctaattttatattgcatcgattgcatga
aatcttgaccgtcaagcggccactcttatcgtttaagaataatacagaacgaattatgatagaaattagcaatgttaaa
gtgactcctccagattactcacctataatcgcgagtattaaaggtaagagttatgacgcattagccacgttcactgtaaa
tatctttaaagaggtaatgaccaaagagggtatatccatcactaaaataagtagttatgagggaaaagattctcatttga
taaaaattccgctactaataggatacgggaataaaaatccacttgatacagccaagtatcttgttcctaatgtcataggt
ggagtctttatcaataaacaatctgtcgaaaaagtaggaattaatctagtagaaaagattacaacatggccaaaattta
gggttgttaagccaaactcattcactttctcgttttcctccgtatcccctcctaatgtattaccgacaagatatcgccattaca
agatatctctggatatatcacaattggaagcgttgaatatatcatcgacaaagacatttataacggtcaatattgttttgct
gtctcaatatttatctagagtgagtctagaattcattagacgtagtttatcatacgatatgcctccagaagttgtctatctagt
aaacgcgataatagatagtgctaaacgaattactgaatctattactgactttaatattgatacatacattaatgacctggt
ggaagctgaacacattaaacaaaaatctcagttaacgatcaacgagttcaaatatgaaatgctgcataactttttacct
catatgaactatacacccgatcaactaaagggattttatatgatatctttactaagaaagtttctctactgtatctaccaca
cttctagatatccagatagagattcgatggtttgtcatcgcatcctaacgtacggcaaatattttgagacgttggcacatg
atgaattagagaattacataggcaacatccgaaacgatatcatgaacaatcacaagaacagaggcacttacgcggt
aaacattcatgtactaacaactcctggacttaatcatgcattttctagtctattgagtggaaagttcaaaaagtcagacgg
tagttatcgaacacatcctcactattcatggatgcagaatatttctattcctaggagtgttggattttatccggatcaagtaa
agatttcaaagatgttttctgtcagaaaataccatccaagtcaatatctttacttttgttcatcggacgttccggaaagaggt
cctcaggtaggtttagtatctcaattgtctgtcttgagttccattacaaatatactaacgtctgagtatttggatttggaaaag
aaaatttgtgagtatatcagatcatattataaagatgatataagttactttgaaacaggatttccaatcactatagaaaat
gctctagtcgcatctcttaatccaaatatgatatgtgattttgtaactgactttagacgtagaaaacggatgggattcttcgg
taacttggaggtaggtattactttagttagggatcacatgaatgaaattcgcattaatattggagcgggaagattagtca
gaccattcttggttgtggataacggagagctcatgatggatgtgtgtccggagttagaaagcagattagacgacatga
cattctctgacattcagaaagagtttccgcatgtcatcgaaatggtagatatagaacaatttacttttagtaacgtatgtga
atcggttcaaaaatttagaatgatgtcaaaggatgaaagaaagcaatacgatttatgtgactttcctgccgaatttagag
atggatatgtagcatcttcactagtgggaatcaatcacaattctggacccagagctattcttggatgtgctcaagctaaa
caagctatctcttgtctgagctcggatatacgaaataaaatagacaatggaattcatttgatgtatccagagaggccaat
cgtgattagtaaggctttagaaacttcaaagattgcggctaattgcttcggccaacatgttactatagcattaatgtcgtac
aaaggtatcaatcaagaggatggaattatcatcaaaaaacaatttattcagagaggcggtctcgatattgttacagcc
aagaaacatcaagtagaaattccgttggaaaactttaataacaaagaaagagataggtctaacgcctattcaaaatt
agaaagtaatggattagttagactgaatgctttcttggaatccggagacgctatagcacgaaatatctcatcaagaact
cttgaagatgattttgctagagataatcagattagctttgatgtttccgaaaaatataccgatatgtacaaatctcgcgttg
aacgagtacaagtagaacttactgacaaagttaaggtacgagtattaaccatgaaagaaagaagacccattctagg
agacaaatttaccactagaacgagtcaaaagggaacagtcgcgtatatcgcggatgaaacggaacttccatacgat
gaaaatggtatcacaccagatgtcattattaattctacatccatcttctctagaaaaactatatctatgttgatagaggttatt
ttaacagccgcatattctgctaagccgtacaacaataagggagaaaaccgacctgtctgttttcctagtagtaacgaa
acatccatcgatacatatatgcaattcgctaaacaatgttatgagcattcaaatccgaaattgtctgatgaagaattatcg
gataaaatcttttgtgaaaagattctctatgatcctgaaacggataagccttatgcatccaaagtattttttggaccaattta
ttacttgcgtctgaggcatttaactcaggacaaggcaaccgttagatgtagaggtaaaaagacgaagctcattagaca
ggcgaatgagggacgaaaacgtggaggaggtatcaagttcggagaaatggagagagactgtttaatagcgcatg
gtgcagccaatactattacagaagttttgaaagattcggaagaagattatcaagatgtgtatgtttgtgaaaattgtgga
gacatagcagcacaaatcaagggtattaatacatgtcttagatgttcaaaacttaatctctctcctctcttaacaaaaatt
gataccacgcacgtatctaaagtatttcttactcaaatgaacgccagaggcgtaaaagttaaattagatttcgaacgaa
ggcctccttcgttttataaaccattagataaagttgatctcaaaccgtcttttctggtgtaatattctagtttggtagtagatac
atatcaatatcatcaaattcgagatccgaattataaaatgggcgtggattgttaactatagaatcggacgtctgatattcg
aaaatctgtggagttttaggttttggtggaggtgtaactgctacttgggatactgaagtctgatattcagaaagctggggg
atgttctggttcgacatccaccgatggtgtcacatcactaatcggttcggtaacgtctgtggacgatggaggcaccactt
ctacaggttctggttctttatcctcagtcatcaacggagctacttcaatgcgaggaaatgtataatttggtaatggtttctcat
gtggatctgaagaagaggtaagatatctactagaaagataccgatcacgttctagttctcttttgtagaacttaactttttct
ttctccgcatctagttgatattccaacctcttcacgttcgcatgggttacctccgcagtttttacgagcgatttcacgttcagc
cttcatgcgtcttatagcatgaattcgcttatcgttatcgggtttagcttctgtcaccttagcaattccttttttattaaactctaca
taatcatatccatttctattgtttgttctaatataaacgagtatagcatcattgctaaatttttcaatagtatcgaaaacagaat
atcctaaaccatataatatatattcaggaacactcaaactaaatgtccaggattctcctaaatacgtaaactttaatagtg
cgaaatcattcaaaaatctaccacttatagatagatagatagtacataaatgcgtatagtagtctacctatctctttattatg
aaaaccggcattacgatcatatatgtcgtgatatacctgtgatccgtttacgttaaaccataaatacatgggtgatcctat
aaacatgaatttatttctaattctcagagctatagttaattgaccgtgtaatatttgcttacatgcatacttgatacgatcatta
ataagatttttatcattgctcgttatttcagaatcgtatatataaggagtaccatcgtgattcttaccagatattatacaaaat
actatatataaaatatattgacccacgttagtaatcatgtaaatgtttaacgttttaaattttgtattcaatgatccattatcata
cgctagcatggtcttatgatattcattctttaaaatataatattgtgttagccattgcattggggctcctaatggagattttttatt
ctcatccattttaggataggctttcataaagtccctaataacttcgtgaataatgtttctatgttttctactgatgcatgtatttgc
ttcgatttttttatcccatgtttcatctatcatagatttaaacgcagtaatgctcgcaacattaacatcttgaaccgttggtaca
attccgttccataaatttataatgttcgccatttatataactcattttttgaatatacttttaattaacaaaagagttaagttactc
atatggacgccgtccagtctgaacatcaatctttttagccagagatatcatagccgctcttagagtttcagcgtgattttcc
aacctaaatagaacttcatcgttgcgtttacaacacttttctatttgttcaaactttgttgttacattagtaatctttttttccaaatt
agttagccgttgtttgagagtttcctcattgtcgtcttcatcggctttaacaattgcttcgcgtttagcctctggctttttagcagc
cgttgtagaaaaaaattcagttgctggaattgcaagatcgtcatctccggggaaaagagttccgtccatttaaagtaca
gattttagaaactgacactctgcgttatttatatttggtacaacacatggattataaatattgatgttaataacatcagaaaa
tgtaaagtctatacattgttgcatcgtgttaaattttctaatggatctagtattattgggtccaacttctgcctgaaatccaaat
atggaagcggatacaaaaccgtttcctggataaaccacacatctccacttttgctttacatcagaaattgtgtcgttgaca
tcttgaactctcctatctaatgccggtgttccacctatagattttgaatattcgaatgctgcatgagtagcattaaattcctta
atattgccataattttcatatattgagtaaccctggataaaaagtaaacacaccgcagccgtagctaccacaataaaa
aaaattgatagagagttcatttataatctattagaagctgacaaaatttttttacacgcatcagacaatgctttaataaata
gttcaacatctacttttgtcatatcgaaccgatggtatgattctaacctagaattacatccgaaaaagttgactatgttcata
gtcattaagtcattaacaaacaacattccagactctggattataagacgatactgtttcgtcacaattacctaccttaatca
tgtgattatgaatattggctattagagcaccttctaagaaatctataatatctttgaaacacgatttaaaatcaaaccacg
aatatacttctacgaagaaagttagtttacccataggagaaataactataaatggagatctaaatacaaaatccggat
ctatgatagttttaacattattatattctctattaaatacctccacatctaaaaatgttaattttgaaactatgtcttcgtttattac
cgtacctgaactaaacgctataagctctattgtttgagaactctttaaacgatattcttgaaatacatgtaacaaagtttcct
ttaactcggtcggtttatctaccatagttacagaatttgtatccttatctataatataataatcaaaatcgtataaagttatata
attatcgcgttcagattgggatcttttcaaatagactaaaaaccccatttctctagtaagtatcttatgtatatgtttgtaaaat
atcttcatggtgggaatatgctctaccgcagttagccattcctcattgacagcggtagatgtattagacaaaactattcca
atgtttaacaagggccattttacgagattattaaatccttgtttgataaatgtagccaatgagggttcgagttcaacgacg
attgaattctcttcccgcggatgctgcatgatgaacgacgggatgttgttcgattgatttggaattctttttcgactttttgtttat
attaaatattttaaaatttatagcggatagcaattcatgtaccacggataatgtagacgcgtattgcgcatcgatatctttat
tattagataaatttatcaataaatgtgagaagtttgcctcgttaaggtcttccatttaaatattatataaacatttgtgtttgtatc
ttattcgtcttttatggaatagttttttactagtaaagctgcaattacacactttgtccgtaaaacataaatataaacaccagc
ttttatcaatcgttccaaaaagtcgacggcggacatttttaacatggcatctattttaaatacacttaggtttttggaaaaaa
catcattttataattgtaacgattcaataactaaagaaaagattaagattaaacataagggaatgtcatttgtattttataa
gccaaagcattctaccgttgttaaatacttgtctggaggaggtatatatcatgatgatttggttgtattggggaaggtaaca
attaatgatctaaagatgatgctattttacatggatttatcatatcatggagtgacaagtagtggaacaatttacaaattgg
gatcgtctatcgatagactttctctaaataggactattgttacaaaagttaataattataattatgatacattttttgacgatga
tgattgatcgctattgcacaattttgtttttttactttctaatatagcgtttagattctttttcatgtgcgaatattgatttactaaaat
atctatgtttaacttttgttctataacgtccttatcggcggtatcggtacatatacgtaattcaccttcacaaaatacggagtc
ttcgataataatagccaatcgattattggatctagctgtctgtatcatattcaacatgtttaatatatcctttcgtttcccctttac
aggcatcgatcgtagcatattttccgcgtctgagatggaaatgttaaaactacaaaaatgcgtaatgttagcccgtccta
atattggtacgtgtctataagtttggcatagtagaataatagacgtgtttaaatgccttccaaagtttaagaattctattaga
gtattgcattttgatagtttatcgcctacatcatcaaaaataagtaaaaagtgtgctgattttttatgattttgtgcgacagca
atacatttttctatgttacttttagttcgtatcagattatattctagagattcctgactactaacgaaattaatatgatttggcca
aatgtatccatcataatctggattataaacgggtgtaaacaagaatacatgtttatattttttaactagtgtagaaaacaga
gatagtaaatagatagtttttccagatccagatcctcccgttaaaaccattctaaacggcatttttaataaattttctcttgaa
aattgtttttcttggaaacaattcataattatatttacagttactaaattaatttgataataaatcaaaatatggaaaactaag
gtcgttagtagggaggagaacaaagaaggcacatcgtgacataaataacatttattatcatgatgacaccagaaaa
cgacgaagagcagacatctgtgttctccgctactgtttacagagacaaaattcagggaaagaataaacgcaaacgc
gtgattggtctatgtattagaatatctatggttatttcactactatctatgattaccatgtccgcgtttctcatagtgcgcctaaa
tcaatgcatgtctgctaacgaggctgctattactgacgccgctgttgccgttgctgctgcatcatctactcatagaaaggtt
gcgtctagcactacgcaatatgatcacaaagaaagctgtaatggtttatattaccagggttcttgttatatattacattcag
actaccagttattctcggatgctaaagcaaattgcactgcggaatcatcaacactacccaataaatccgatgtcttgact
acctggctcattgattatgttaaggatacatggggatctgatggtaatccaattacaaaaactacatccgattatcaagat
tctgatgtatcacaagaagttagaaagtatttttgtgttaaaacaatgaactaatatttatttttgtacattaataaatgaaat
cgcttaatagacaaactgtaagtaggtttaagaagttgtcggtgccggtcgctataatgatgatactctcaaccattatta
gtggcataggaacatttctgcattacaaagaagaactgatgcctagtgcttgcgccaatggatggatacaatacgata
aacattgttatttagatactaacattaaaatgtctacagataatgcggtttatcagtgtcgtaaattacgagccagattgcc
tagaccggatactagacatctgagagtattgtttagtattttttataaagattattgggtaagtttaaaaaagaccaatgat
aaatggttagatattaataatgataaagatatagatattagtaaattaacaaattttaaacaactaaacagtacgacgg
atgctgaagcgtgttatatatacaagtctggaaaactggttaaaacagtatgtaaaagtactcaatctgtactatgtgtta
aaaaattctacaagtgacaacaaaaaatgaattaataataagtcgttaacgtacgccgccatggacgccgcgtttgtt
attactccaatgggtgtgttgactataacagatacattgtatgatgatctcgatatctcaatcatggactttataggaccata
cattataggtaacataaaaactgtccaaatagatgtacgggatataaaatattccgacatgcaaaaatgctactttagc
tataagggtaaaatagttcctcaggattctaatgatttggctagattcaacatttatagcatttgtgccgcatacagatcaa
aaaataccatcatcatagcatgcgactatgatatcatgttagatatagaagataaacatcagccattttatctattcccat
ctattgatgtttttaacgctacaatcatagaagcgtataacctgtatacagctggagattatcatctaatcatcaatccttca
gataatctgaaaatgaaattgtcgtttaattcttcattctgcatatcagacggcaatggatggatcataattgatgggaaat
gcaatagtaattttttatcataaaagttgtaaagtaaataataaaacaataaatattgaactagtagtacgtatattgagc
aatcagaaatgatgctggtacctcttatcacggtgaccgtagttgcgggaacaatattagtatgttatatattatatatttgt
aggaaaaagatacgtactgtctataatgacaataaaattatcatgacaaaattaaaaaagataaagagttctaattcc
agcaaatctagtaaatcaactgatagcgaatcagactgggaggatcactgtagtgctatggaacaaaacaatgacg
tagataatatttctaggaatgagatattggacgatgatagcttcgctggtagtttaatatgggataacgaatccaatgttat
ggcgcctagcacagaacacatttacgatagtgttgctggaagcacgctgctaataaataatgatcgtaatgaacaga
ctatttatcagaacactacagtagtacttaatgaagataccaaacagaatcctaactattcatccaatcctttcgtaaatt
ataataaaaccagtatttgtagcaagtcaaatccgttcattacagaactcaacaataaatttagtgagaataatccgttt
agacgagcacatagcgatgattatcttaataagcaagaacaagatcatgaacacgatgatatagaatcattggtgtg
attagtttcctttttataaaattgaagtaatatttagtattattgctgccgtcacgttgtacaaatggagatattccctgtattcg
gcatttctaaaattagcaattttattgctaataatgactgtagatattatatagatacagaacatcaaaaaattatatctgat
gagatcaatagacagatggatgaaacggtacttcttaccaacatcttaagcgtagaagttgtaaatgacaatgagatg
taccatcttattcctcatagattatcgacgattatactctgtattagttctgtcggaggatgtgttatctctatagataatgacgt
caatggcaaaaatattctaacctttcccattgatcatgctgtaatcatatccccactgagtaaatgtgtcgtagttagcaa
gggtcctacaaccatattggttgttaaagcggatatacctagcaaacgattggtaacatcgtttacaaacgacatactgt
atgtaaacaatctatcactgattaattattcgccgttgtctgtattcattattagacgagttaccgactatttggatagacaca
tatgcgatcagatatttgcgaataataagtggtattccattataaccatcgacaataagcagtttcctattccatcaaactg
tataggtatgtcctctgccaagtacataaattctagcatcgagcaagatactttaatacatgtttgtaacctcgagcatcc
attcgacttagtatacaaaaaaatgcagtcgtacaattctgtacctatcaaggaacaaatattgtacggtagaattgata
atataaatatgagcattagtatttctgtggattaatagatttctagtatggggatcattaatcatctctaatctctaaatacctc
ataaaacgaaaaaaaagctattatcaaatactgtacggaatggattcattctcttctctttttatgaaactctgttgtatatct
actgataaaactggaagcaaaaaatctgataaaaagaataagaataagatcaaggattattataaaataacaatag
ttcctggttcctcttccacgtctactagctcgtggtattatacacatgcctagtaatagtctctttgcgttgacggaaagcag
actagaaataacaggctaaaatgttcagacaccataatagttcccaacccagataataacagagtaccatcaacac
attcctttaaactcaatcccaaacccaaaaccgttaaaatgtatccggccaattgatagtagataatgaggtgtacagc
gcatgatgatttacacagtaaccaaaatgaaaatactttagtaattataagaaatatagatggtaacgtcatcatcaac
aatccaataatatgccggagagtaaacattgacggataaaacaaaaatgctccgcataactctatcatggcaataac
acaaccaaatacttgtaagattcctaaattagtagaaaatacaacggatatcgatgtataagtgatctcgagaaataat
aagaataaagtaatgcccgtaaagataaacatcaacattgtttggtaatcattaaaccaattagtatgaagttgaacta
atttcacagtagattttattccagtattatccccgcatgtataagtacctggtaagatatctttatattccataatcaatgaga
catcactatctgataacgaatgaagtctagcactagtatgccatttacttaatattgtcgtcttggaagttttattataagtta
aaatatcatggttatccaatttccatctaatatactttgtcggattatctatagtacacggaataatgatggtatcattacatg
ctgtatactctatggtctttgtagttgttataacaaccaacgtatagaggtatatcaacgatattctaactcttgacattttttatt
tatttaaaatgatacctttgttatttattttattctattttgctaacggtattgaatggcataagtttgaaacgagtgaagaaata
atttctacttacttattagacgacgtattatacacgggtgttaatggggcggtatacacattttcaaataataaactaaaca
aaactggtttaactaataataattatataacaacatctataaaagtagaggatgcggaaccaataacggaaatccca
aatgttggaaaatagacggttcagacgacccaaaacatagaggtagaggatacgctccttatcaaaatagcaaagt
aacgataatcagtcacaacggatgtgtactatctgacataaacatatcaaaagaaggaattaaacgatggagaaga
tttgacggaccatgtggttatgatttatacacggcggataacgtaattccaaaagatggtttacgaggagcattcgtcga
taaagatggtacttatgacaaagtttacattcttttcactgatactatcggctcaaagagaattgtcaaaattccgtatata
gcacaaatgtgcctaaacgacgaaggtggtccatcatcattgtctagtcatagatggtcgacgtttctcaaagtcgaatt
agaatgtgatatcgacggaagaagttatagacaaattattcattctagaactataaaaacagataatgatacgatacta
tatgtattcttcgatagtccttattccaagtccgcattatgtacctattctatgaataccattaaacaatctttttctacgtcaaa
attggaaggatatacaaagcaattgccgtctccagctcctggtatatgtttaccagctggaaaagttgttccacatacca
cgtttgaagtcatagaaaaatataatgtactagatgatattataaagcctttatctaaccaacctatcttcgaaggaccgt
ctggtgttaaatggttcgatataaaggagaaggaaaatgaacatcgggaatatagaatatacttcataaaagaaaatt
ctatatattcgttcgatacaaaatctaaacaaactcgtagctcgcaagtcgatgcgcgactattttcagtaatggtaactt
cgaaaccgttatttatagcagatatagggataggagtaggaatgccacaaatgaaaaaaatacttaaaatgtaatctt
aatcgagtacaccgcacgacaatgaacaaacataagacagattatgctggttatgcttgctgcgtaatatgcggtcta
attgttggaattatttttacagcgacactattaaaagttgtagaacgtaaattagttcatacaccatcaatagataaaacg
ataaaagatgcatatattagagaagattgtcctactgactggataagctataataataaatgtatccatttatctactgatc
gaaaaacctgggaggaaggacgtaatgcatgcaaagctctaaatccaaattcggatctaattaagatagagactcc
aaacgagttaagttttttaagaagcattagacgcggatattgggtaggagaatccgaaatattaaaccagacaaccc
catataattttatagctaaaaatgccacgaagaatggaactaaaaaacggaaatatatttgtagtacaacgaatactc
ccaaactacatttttatcataccactacttcggttagatgttttagaaaaaaataaatatcgccgtaccgttcttgtttttataa
aaataacaattaacaattatcaaattttttctttaatattttacgtggttgaccattcttggtggtaaaataatctcttagtgttgg
aatggaatgctgtttaatgtttccgcactcatcgtatattttgacgtatgcagtcacatcgtttacgcaatagtcagactgta
gttctatcatgcttcctacatcagaaggaggaacagttttaaagtctcttggttttaatctattgccattagttttcatgaaatc
ctttgttttatccacttcacattttaaataaatgtccactatacattcttctgttaattttactagatcgtcatgggtcatagaattt
ataggttccgtagtccatggatccaaactagcaaacttcgcgtatacggtatcgcgattagtgtatacaccaactgtatg
aaaattaagaaaacagtttaataaatcaacagaaatatttaatcctccgtttgatacagatgcgccatatttatggatttc
ggattcacacgttgtttgtctgaggtgttcgtctagtgttgcttctacgtaaacttcgattcccatatattctttattgtcagaatc
gcataccgatttatcatcatacactgtttgaaaactaaatggtatacacatcaaaataataaataataacgagtacattct
gcaatattgttatcgtaattggaaaaatagtgttcgagtgagttggattatgtgagtattggattgtatattttattttatattttat
attttgtagtaagaatagaatgctaatgtcaagtttattccaatagatgtcttattaaaaaacatatataataaataacaat
ggctgaatggcataaaattatcgaggatatctcaaaaaataataagttcgaggatgccgccatcgttgattacaagac
tacaaagaatgttctagctgctattcctaacagaacatttgccaagattaatcctctcatcactaatcgtaatattctaaaa
cctcttattggtcagaaatattgtattgtatatactaactctctaatggatgagaacacgtatgctatggagttgcttactgg
gtacgcccctgtatctccgatcgttatagcgagaactcataccgcacttatatttttgatgggtaagccaacaacatcca
gacgtgacgtgtatagaacgtgtagagatcacgctacccgtgtacgtgcaactggtaattaaaataaaaagtaatatt
catatgtagtgtcaattttaaatgatgatgatgaaatggataatatccatattgacgatgtcaataatgccggtattggcat
acagttcatcgatttttagatttcattcagaggatgtggaattatgttatgggcatttgtattttgataggatctataatgtagta
aatataaaatataatccgcatattccatatagatataattttattaatcgcacgttaaccgtagatgaactagacgataat
gtcttttttacacatggttattttttaaaacacaaatatggttcacttaatcctagtttgattgtctcattatcaggaaacttaaa
atataatgatatacaatgctcagtaaatgtatcgtgtctcattaaaaatttggcaacgagtacatctactatattaacatct
aaacataagacttattctctacatcggtccacgtgtattactataataggatacgattctattatatggtataaagatataa
atgacatctatgattttactgcaatatgtatgctaatagcgtctacattgatagtgaccatatacgtgtttaaaaaaataaa
aatgaactcttaattatgctatgctattagaaatggataaaatcaaaattacggttgattcaaaaattggtaatgttgttacc
atatcgtataacttggaaaagataactattgatgtcacacctaaaaagaaaaaagaaaaggatgtattattagcgcaa
tcagttgctgtcgaagaggcaaaagatgtcaaggtagaagaaaaaaatattatcgatattgaagatgacgatgatat
ggatgtagaaagcgcataatacgatctataaaaataagtatataaatactttttatttactgtactcttactgtgtagtggtg
ataccctactcgattatttttttaaaaaaaaatacttattctgattcttctagccatttccgtgttcgttcgaatgccacatcgac
gttaaagataggggagtagttgaaatctagttctgcattgttggtacgcacctcaaatgtagtgttggatatcttcaacgta
tagttgttgagtagtgatggttttctaaatagaattctcttcatatcattcttgcacgcgtacatttttagcatccatcttggaatc
ctagatccttgttctattcccaatggtttcatcaatagaagattaaacatatcgtacgaacacgatggagagtaatcgtag
caaaagtaagcatttcctttaatctcagatcccggatactggatatattttgcagccaacacgtgcatccatgcagcattt
cctacatatacccggctatgtaccgcgttatcatcgactgtacgatacataatgttaccgtgttgcttacattgctcgtaaa
agactttcatcaatttgtctccttctccgtaaattccagtgggtcttaggcaacaagtatacaattttgctccattcatgattac
ggaattattggctttcataaccagttgctcggccatacgtttactttttgcgtatacatgtcctggtgatatatcataaagggt
atgctcatggccgatgaatggatcaccgtgtttattgggtcctattgcttccatgctactagtatagatcaaatacttgattc
ctaggtccacacaagctgccaatatagtctgtgttccataatagtttactttcatgatttcattatcggtgtattttccaaatac
atccactagagcagctgtatgaataatcagatttaccccatctagcgcttctcttaccttatcaaagtcgtttatatcacatt
gtatatagtttataaccttaactttcgaggttattggttgtggatcttctacaatatctatgactctgatttcttgaacatcatctg
cactaattaacagttttactatatacctgcctagaaatccggcaccaccagtaaccgcgtacacggccattgctgccac
tcataatatcagactacttattctattttactaaataatggctgtttgtataatagaccacgataatatcagaggagttattta
ctttgaaccagtccatggaaaagataaagttattggattaaaatccggaacgtatagtttgataattcatcgttacggag
atattagtcaaggatgtgattccataggcagtccagaaatatttatcggtaacatctttgtaaacagatatggtgtagcat
atgtttatttagatacagatgtaaatatatctacaattattggaaaggcgttatctatttcaaaaaatgatcagagattagc
gtgtggagttattggtatttcttacataaatgaaaagataatacattttcttacaattaacgagaatggcgtttgatatatca
gttaatgcgtctaaaacaataaatgcattagtttacttttctactcagcaaaataaattagtcatacgtaatgaagttaatg
atacacactacactgtcgaatttgatagggacaaagtagttgacacgtttatttcatataatagacataatgactccatag
agataagaggggtgcttccagaggaaactaatattggttgcgcggttaatacgccggttagtatgacttacttgtataat
aagtatagttttaaactgattttagcagaatatataagacacagaaatactatatccggcaatatttattcggcattgatga
cactagatgatttggctattaaacagtatggagacattgatctattatttaatgagaaacttaaagtagactccgattcgg
gactatttgactttgtcaactttgtaaaggatatgatatgttgtgattctagaatagtagtagctctatctagtctagtatctaa
acattgggaattgacaaataaaaaatataggtgtatggcattagccgaacatatatctgatagtattccaatatctgagc
tatctagactacgatacaatctatgtaagtatctacgcgggcacactgagagcatagaggatgaatttgattattttgaa
gacgatgattcgtctacatgttctgccgtaaccgacagggaaacggatgtataattttttttatagcgtgaaggatatgat
aaaaaatataattgttgtatttatcccattccaatcaccttatatgattctgtaacacaatgaaggagtcttatagatgtata
gaggtcagatactggtttgataaactgtttattccacataagtatgtttgactttatggttagacccgcatactttaacaaatc
actgaaaattggagttaggtattgacctctcagaatcagttgccgttctggaacattaaatgtattttttatgatatactcca
acgcatttatgtgggcatacaacaagtcattactaatggagtattccaagagaagagatttcaacagactgtttatgaa
ctcgaatgccgcctcattgtcgcttatattgatgatgtcgaattctcccaatatcatcaccgatgagtagctcatcttgttatc
gggatccaagttttctaaagatgtcattaaaccctcgatcatgaatggatttatcatcatcgtttttatgttggacatgagctt
agtccgtttgtccacatctatagacgacgatttctgaattatttcatatatccctctctttaactccaggaacttgtcaggatg
gtctactttaatatgttctcgtctaagagatgaaaatctttggatggttgcacgcgacttttctctaaaggatcctctcttaaat
gaatccatcttatccttggacaagatggacagtctattttccttagatggtttaatatttttgttacccatgatctataaaggta
gacctaatcgtctcggatgaccatatatttattttcagttttattatacgcataaattgtaaaaaatatgttaggtttacaaaa
atgtctcgtggggcattaatcgtttttgaaggattggacaaatctggaaaaacaacacaatgtatgaacatcatggaat
ctataccggcaaacacgataaaatatcttaactttcctcagagatccactgtcactggaaagatgatagatgactatct
aactcgtaaaaaaacctataatgatcatatagttaatctattattttgtgcaaatagatgggagtttgcatcttttatacaag
aacaactagaacagggaattactttaatagttgatagatacgcattctctggagtagcgtatgccgccgctaaaggcg
cgtcaatgactctcagtaagagttatgaatctggattgcctaaacccgacttagttatattcttggaatctggtagcaaag
aaattaatagaaacgtcggcgaggaaatttatgaagatgttacattccaacaaaaggtattacaagaatataaaaaa
atgattgaagaaggagatattcattggcaaattatttcttctgaattcgaggaagatgtaaagaaggagttgattaagaa
tatagttatagaggctatacacacggttactggaccagtggggcaactgtggatgtaatagtgaaattacattttttataa
atggatgaagcatattactctggcaacttggaatcagtactcggatacgtgtccgatatgcataccgaactcgcatcaa
tatctcaattagttattgccaagatagaaactatagataatgatatattaaacaaggacattgtaaattttatcatgtgtag
atcaaacttggataatccatttatctctttcctagatactgtatatactattatagatcaagagatctatcagaccgaattgat
taattcattagacgacaatgaaattatcgattgtatagttaacaagtttatgagcttttataaggataacctagaaaatata
gtagatgctatcattactctaaaatatataatgaataatccagattttaaaactacgtatgccgaagtactcggttccaga
atagcggatatagatattaaacaagtgatacgtgagaatatactacaattgtctaataatatccgcgaacgatatttgtg
aaaatattaaaaaaaaatactttttttattaaatgacgtcgcttcgcgaatttagaaaattatgctgtgatatatatcacgca
tcaggatataaagaaaaatctaaattaattagagactttataacagatagggatgataaatatttgatcattaagctattg
cttcccggattagacgatagaatttataacatgaacgataaacaaattataaaattatatagtataatatttaaacaatct
caggaagatatgctacaagatttaggatacggatatataggagacactattaggactttcttcaaagagaacacaga
aatccgtccacgagataaaagcattttaactttagaagaagtggatagttttttaactacgttatcatccgtaactaaaga
atcgcatcaaataaaattattgactgatatcgcatccgtttgtacatgtaatgatttaaaatgtgtagtcatgcttattgataa
agatctaaaaattaaagcgggccctcggtacgtacttaacgctattagtcctcatgcctatgatgtgtttagaaaatctaa
taacttgaaagagataatagaaaatgcatctaaacaaaatctagactctatatctatttctgttatgactccaattaatccc
atgttagcggaatcgtgtgattctgtcaataaggcgtttaaaaaatttccatcaggaatgtttgcggaagtcaaatacgat
ggtgaaagagtacaagttcataaaaataataacgagtttgccttctttagtagaaacatgaaaccagtactctctcata
aagtggattatctcaaagaatacataccgaaagcatttaaaaaagctacgtctatcgtattggattctgaaattgttcttgt
agacgaacataatgtaccgctcccgtttggaagtttaggtatacacaaaaagaaagaatataaaaactctaacatgt
gtttgttcgtgtttgactgtttgtactttgatggattcgatatgacggacattccattgtacgaacgaagatcttttctcaaaga
tgttatggttgaaatacccaatagaatagtattctcagagttgacgaatattagtaacgagtctcagttaactgacgtattg
gatgatgcactaacgagaaaattagaaggattggtcttaaaagatattaatggagtatacgaaccgggaaagagaa
gatggttaaaaataaagcgagactatttgaacgagggttccatggcagattctgccgatttagtagtactaggtgcttac
tatggtaaaggagcaaagggtggtatcatggcagtctttctaatgggttgttacgacgatgaatccggtaaatggaaga
cggttaccaagtgttcaggacacgatgataatacgttaagggagttgcaagaccaattaaagatgattaaaattaaca
aggatcccaaaaaaattccagagtggttagtagttaataaaatctatattcccgattttgtagtagaggatccaaaaca
atctcagatatgggaaatttcaggagcagagtttacatcttccaagtcccataccgcaaatggaatatccattagatttc
ctagatttactaggataagagaggataaaacgtggaaagaatctactcatctaaacgatttagtaaacttgactaaatc
ttaatagttacatacaaattaaaataacactatttagttggtggtcgccatggatggtgttattgtatactgtctaaacgcgtt
agtaaaacatggcgaggaaataaatcatataaaaaatgatttcatgattaaaccatgttgtgaaaaagtcaagaacg
ttcacattggcggacaatctaaaaacaatacagtgattgcagatttgccatatatggataatgcggtatccgatgtatgc
aattcactgtataaaaagaatgtatcaagaatatccagatttgctaatttgataaagatagatgacgatgacaagactc
ctactggtgtatataattattttaaacctaaagatgccattcctgttattatatccataggaaaggatagagatgtttgtgaa
ctattaatctcatctgataaagcgtgtgcgtgtatagagttaaattcatataaagtagccattcttcccatggatgtttccttttt
taccaaaggaaatgcatcattgattattctcctgtttgatttctctatcgatgcggcacctctcttaagaagtgtaaccgata
ataatgttattatatctagacaccagcgtctacatgacgagcttccgagttccaattggttcaagttttacataagtataaa
gtccgactattgttctatattatatatggttgttgatggatctgtgatgcatgcaatagctgataatagaacttacgcaaatat
tagcaaaaatatattagacaatactacaattaacgatgagtgtagatgctgttattttgaaccacagattaggattcttgat
agagatgagatgctcaatggatcatcgtgtgatatgaacagacattgtattatgatgaatttacctgatgtaggcgaattt
ggatctagtatgttggggaaatatgaacctgacatgattaagattgctctttcggtggctggtatttggaaagttttataggt
agttgatagaacaaaatacataattttgtaaaaataaatcactttttatactaatatgacacgattaccaatacttttgttact
aatatcattagtatacgctacaccttttcctcagacatctaaaaaaataggtgatgatgcaactttatcatgtaatcgaaat
aatacaaatgactacgttgttatgagtgcttggtataaggagcccaattccattattcttttagctgctaaaagcgacgtctt
gtattttgataattataccaaggataaaatatcttacgactctccatacgatgatctagttacaactatcacaattaaatcat
tgactgctagagatgccggtacttatgtatgtgcattctttatgacatcgcctacaaatgacactgataaagtagattatga
agaatactccacagagttgattgtaaatacagatagtgaatcgactatagacataatactatctggatctacacattcac
cggaaactagttctgagaaacctgattatatagataattctaattgctcgtcggtattcgaaatcgcgactccggaacca
attactgataatgtagaagatcatacagacaccgtcacatacactagtgatagcattaatacagtaagtgcatcatctg
gagaatccacaacagacgagactccggaaccaattactgataaagaagaagatcatacagttacagacactgtct
catacactacagtaagtacatcatctggaattgtcactactaaatcaaccaccgatgatgcggatctttatgatacgtac
aatgataatgatacagtaccatcaactactgtaggcggtagtacaacctctattagcaattataaaaccaaggactttgt
agaaatatttggtattaccgcattaattatattgtcggccgtggcaatattctgtattacatattatatatataataaacgttca
cgtaaatacaaaacagagaacaaagtctagatttttgacttacataaatgtctgggatagtaaaatctatcatattgagc
gggccatctggtttaggaaagacagccatagccaaaagactatgggaatatatttggatttgtggtgtcccataccact
agatttcctcgtcctatggaacgagaaggtgtcgattaccattacgttaacagagaggccatctggaagggaatagcc
gccggaacatactgagtttttaggaaatatttacggaacttctaaaactgctgtgaatacagcggctattaataatcgtat
ttgtgtgatggatctaaacatcgacggtgttagaagttttaaaaatacttacctaatgccttactcggtgtatataagacct
acctctcttaaaatggttgagaccaagcttcgttgtagaaacactgaagcggatgatgagattcatcgtcgtgtgatgttg
gcaaaaactgacatggatgaggcaggtgaagccggtctattcgacactattatcattgaagatgatgtgaatttagcat
atagtaagttaattcagatactacaggaccgtattagaatgtattttaacactaattagagacttaagacttaaaacttgat
aattaataatataactcgtttttatatgtggctatttcaacgtctaatgtattagttaaatattaaaacttaccacgtaaaactt
aaaatttaaaatgatatttcattgacagatagatcacacattatgaactttcaaggacttgtgttaactgacaattgcaaa
aatcaatgggtcgttggaccattaataggaaaaggtggatttggtagtatttatactactaatgacaataattatgtagta
aaaatagagcccaaagctaacggatcattatttaccgaacaggcattttatactagagtacttaaaccatccgttatcg
aagaatggaaaaaatctcacaatataaagcacgtaggtcttatcacgtgcaaggcatttggtctatacaaatccattaa
tgtggaatatcgattcttggtaattaatagattaggtgcagatctagatgcggtgatcagagccaataataatagattacc
aaaaaggtcggtgatgttgatcggaatcgaaatcttaaataccatacaatttatgcacgagcaaggatattctcacgg
agatattaaagcgagtaatatagtcttggatcaaatagataagaataaattatatctagtggattacggattggtttctaa
attcatgtctaatggcgaacatgttccatttataagaaatccaaataaaatggataacggtactctagaatttacacctat
agattcgcataaaggatacgttgtatctagacgtggagatctagaaacacttggatattgtatgattagatggttgggag
gtatcttgccatggactaagatatctgaaacaaagaattgtgcattagtaagtgccacaaaacagaaatatgttaaca
atactgcgactttgttaatgaccagtttgcaatatgcacctagagaattgctgcaatatattaccatggtaaactctttgac
atattttgaggaacccaattacgacaagtttcggcacatattaatgcagggtgtatattattaagtgtggtgtttggttgatgt
aaaatttttgtcgataaaaattaaaaaataacttaatttattattgatctcgtgtgtacaaccgaaatcatggcgatgttttac
gcacacgctctcggtgggtacgacgagaatcttcatgcctttcctggaatatcatcgactgttgccaatgatgtcagtttat
aataacaagtatgacattgtaaaagacaaatatatgtggtgttacagtcaggtgaacaagagatatattggagcactg
ctgcctatgtttgagtgcaatgaatatctacaaattggagatccgatccatgatcaagaaggaaatcacatatcgccac
aaaaactactatgctctaagcggaatcgggtacgagagtctagacttgtgtttggaaggagtagggattcatcatcac
gtacttgaaacagaaaacgctgtatatggaaaagttcaacatgattattctactatcaaagagaaggccaaagaaat
gaatgcactcagttcaggacctatcatcgattaccacgtctggataggagattgtatctgtcaagttactgctgtggacgt
acatggaaaggaaattatgagaatgagattcaaaaagggtgcggtgcttccgatcccaaatctggtaaaagttaaac
ttggggagaatgatacagaaaatctttcttctactatatcggcggcaccatcgaggtaaccacctctctggaagacagt
gtgaatcatgtactcatgaaacgtttggaatctatacgccatatgtggtctgttgtatatgatcattttgatattgtgaatggta
aagaatgctgttatgtgcatacgcatttgtctaatcaaaatcttataccgagtactgtaaaaacaaatttgtacatgaaga
ctatgggatcatgcattcaaatgagtatcttagcgaactgaaggaatcaggtggatggagtcccagaccagaaatgc
aggaatttgaatatccagatggagtggaagacactgaatcaattgagagattggtagaggagttcttcaatagatcag
aacttcaggctggtaaatctattaatgttaaacatacatctgtttcagctaagcaactaagaacacgtatactctcatctttt
gccaacacagagggtggatatttgttcattggagttgataataatacacacaaagtatttggattcacggtgggttacga
ctacctcagactgatagagaatgatatagaaaagcatatcaaaagactttgtgttgtgtatttctgtgagaagaaagag
gacatcaagtacacgtgtcgattcatcaaggtatataaacctggggatgaggctacctcgacatacgtgtgcgctatc
aaagtggaaagatgctgttgtgctgtgtttgcagattggccagaatcatggtatcaagaagtattctccagatgaatagg
tgtcacatataaaattttaattaatgtaactatagagaacaaataataggttgtaatatcatatagacaataactaacaat
taattagtaactgttatctctttttaactaactaactatacctattaatacatcgtaattatagttcttaacatctattaatcattga
ttcgcttctttaattttttataaaccaacattgttaattgaaaagggataacatgttacagaatataaattatatatggattttttt
taaaaaggaaatacttgactggagtgtatatttatctcttcattatatagcacgcgtgttttccaatttttccacatcccatata
atacaggattataatctcgttcgaacatacgagaaagtggataaaacaatagttgattttttatctaggttgccaaatttatt
ccatattttagaatatggggaaaatattctacatatttattctatggatgatgctaatacgaatattataattttttttctagata
gagtattaaatattaataagaacgggtcatttatacacaatctcaggttatcatcatccattaatataaaagaatatgtata
tcaattagttaataatgatcatccagataataggataagactaatgcttgaaaatggacgtagaacaagacattttttgtc
ctatatatcagatacagttaatatctatatatgtattttatatagatgccgaagacagttacggttgtacattattacatagat
gtatatatcactataagaaatcagaatcagaatcagaatcatacaatgaattaattaagatattgttaaataatggatca
gatgtagataaaaaagatacgtacggaaacacaccttttatcctattatgtaaacacgatatcaacaacgtggaattgt
ttgagatatgtttagagaatgctaatatagactctgtagactttaatagatatacacctcttcattatgtctcatgtcgtaata
aatatgattttgtaaagttattaatttctaaaggagcaaatgttaatgcgcgtaataaattcggaactactccattttattgtg
gaattatacacggtatctcgcttataaaactatatttggaatcagacacagagttagaaatagataatgaacatatagtt
cgtcatttaataatttttgatgctgttgaatctttagattatctattatccagaggagttattgatattaactatcgtactatttacg
acgctgtcagttataatgcgtataatacgttggtctatctattaaacagaaatggtgattttgagacgattactactagtgg
atgtacatgtatttcggaagcagtcgcaaacaacaacaaaataataatggaagtactattgtctaaacgaccatctttg
aaaattatgatacagtctatgatagcaattactaaacataaacagcataatgcagatttattgaaaatgtgtataaaata
tactgcgtgtatgaccgattatgatactcttatagatgtacaatcactacagcaatataaatggtatattttaagatgtttcg
atgaaatagatatcatgaagagatgttatataaaaaataaaactgtattccaattagttttttgtatcaaagacattaatac
tttaatgagatacggtaaacatccttctttcgtgaagtgcactagtctcgacgtatacggaagtcgtgtacgtaatatcata
gcatctattagatatcgtcagagattaattagtctattatccaagaagctggatcctggagataaatggtcgtgttttccta
acgaaataaaatataacgataacgaactgtccacatatctaaaaatcttataaacactattaaaatataaaatcacact
acatcattgtttccttttagtgctcgacagtgtatactatttttaacgctcataaataaaaatgaaaacgatttccgttgttacg
ttgttatgcgtactacctgctgttgtttattcaacatgtactgtacccactatgaataacgctaaattaacgtctaccgaaac
atcgtttaataataaccagaaagttacgtttacatgtgatcagggatatcattcttcggatccaaatgctgtctgcgaaac
agataaatggaaatacgaaaatccatgcaaaaaaatgtgcacagtttctgattacatctctgaactatataataaacc
gctatacgaagtgaattccaccatgacactaagttgcaacggcgaaacaaaatattttcgttgcgaagaaaaaaatg
gaaatacttcttggaatgatactgttacgtgtcctaatgcggaatgtcaacctcttcaattagaacacggatcgtgtcaac
cagttaaagaaaaatactcatttggggaatatataactatcaactgtgatgttggatatgaggttattggtgcttcgtacat
aagttgtacagctaattcttggaatgttattccatcatgtcaacaaaaatgtgatataccgtctctatctaatggattaatttc
cggatctacattttctatcggtggcgttatacatcttagttgtaaaagtggttttatactaacgggatctccatcatccacatg
tatcgacggtaaatggaatcccatactcccaacatgtgtacgatctaacgaaaaatttgatccagtggatgatggtccc
gacgatgagacagatttgagcaaactctcgaaagacgttgtacaatatgaacaagaaatagaatcgttagaagcaa
cttatcatataatcatagtggcgttaacaattatgggcgtcatatttttaatctccgttatagtattagtttgttcctgtgacaaa
aataatgaccaatataagttccataaattgctaccgtgaatataaatccgttaaaataatgaataattaataattaataatt
taataacaaacaagtatcaaaagattaaagacttatagctagaatcaattgagatgtcttcttcagtggatgttgatatct
acgatgccgttagagcatttttactcaggcactattataacaagagatttattgtgtatggaagaagtaacgccatattac
ataatatatacaggctatttacaagatgcgccgttataccgttcgatgatatagtacgtactatgccaaatgaatcacgtg
ttaaacaatgggtgatggatacacttaatggtataatgatgaatgaacgcgatgtttctgtaagcgttggcaccggaata
ctattcatggaaatgtttttcgattacaataaaaatagtatcaacaatcaactaatgtatgatataattaatagcgtatctat
aattctagctaatgagagatatagaagcgcttttaacgacgatggtatatacatccgtagaaatatgattaacaagttgt
acggatacgcatctctaactactattggcacgatcgctggaggtgtttgttattatctgttgatgcatctagttagtttgtataa
ataattatttcaatatactagttaaaattttaagattttaaatgtataaaaaactaataacgtttttatttgtaataggtgcatta
gcatcctattcgaataatgagtacactccgtttaataaactgagtgtaaaactctatatagatggagtagataatataga
aaattcatatactgatgataataatgaattggtgttaaattttaaagagtacacaatttctattattacagagtcatgcgacg
tcggatttgattccatagatatagatgttataaacgactataaaattattgatatgtctactattcaacgcagaggtcacac
gtgtagaatatctaccaaattatcatgccattatgataagtacccttatattcacaaatatgatggtgatgagcgacaata
ttctattactgcagagggaaaatgctataaaggaataaaatatgaaataagtatgatcaacgatgatactctattgaga
aaacatactcttaaaattggatctacttatatatttgatcgtcatggacatagtaatacatattattcaaaatatgatttttaaa
aatttaaaatatattatcacttcagtgacagtagtcaaataacaaacaacaccatgagatatattataattctcgcagtttt
gttcattaatagtatacacgctaaaataactagttataagtttgaatccgtcaattttgattccaaaattgaatggactggg
gatggtctatacaatatatcccttaaaaattatggcatcaagacgtggcaaacaatgtatacaaatgtaccagaagga
acatacgacatatccgcatttccaaagaatgatttcgtatctttctgggttaaatttgaacaaggcgattataaagtggaa
gagtattgtacgggaccaccgactgtaacattaactgaatacgacgaccatccgtatgctactagaggtagcaaaaa
gattcctatttacaaacgcggtgacatgtgtgatatctacttgttgtatacggctaacttcacattcggagattctaaagaa
ccagtaccatatgatatcgatgactacgattgcacgtctacaggttgcagcatagactttgtcacaacagaaaaagtgt
gcgtgacagcacagggagccacagaagggtttctcgaaaaaattactccatggagttcgaaagtatgtctgacacct
aaaaagagtgtatatacatgcgcaattagatccaaagaagatgttcccaatttcaaggacaaaatggccagagttat
caagagaaaatttaactaaatttctcggtagcacatcaaatgatgttaccacttttcttagcatgcttaacttgactaaatat
tcataactaatttttattaatgatacaaaaacgaaataaaactgcatattatacactggttaacgcccttataggctctaac
cattttcaagatgaggtccctgattatagtccttctgttcccctctatcatctactccatgtctattagacgatgtgagaagac
tgaagaggaaacatggggattgaaaatagggttgtgtataattgccaaagatttctatcccgaaagaactgattgcagt
gttcatctcccaactgcaagtgaaggcaatggattcagggatatacgaaacaccgataaattataaaaaaagcaatg
tgtccgctgtttccgttaataatactattttcgtaactggcggattattcataaataactctaatagcacgatcgtggttaaca
atatggaaaaacttgacatttataaagacaaacaatggtcgattatagaaatgcctatggctagggtatatcacggcat
cgactcgacatttggaatgttatattttgccggaggtctatccgttaccgaacaatatggtaatttagagaaaaacaacg
agatatcttgttacaatcctagaacgaataagtggtttgatatttcatatactatttataagatatccatatcatcattgtgtaa
actaaataacgtcttctatgtatttagtaaggacattggatatgtggaaaagtatgatggtctccccgctataaaggcatt
atcaacttctccttattgattgaaaatgaaaatataaatagtttttatgtatagcagtattaccctatagttttattgcttactact
aacatggatacagatacagatgttacaaatgtagaagatatcatgaatgaaatagatagagagaaagaagaaata
ctaaaaaatgtagaaattgaaaataataaaaacattaacaagaatcatcccaatgaatatattagagaagcactcgtt
attaatacaagtagtaatagtgattccattgataaagaagttatagaatgtatcagtcacgatgtaggaatatagatcat
atctactaatttttataatcaatacaaaacataaaaaacaactcgttattacatagcaggcatggaatccttcaagtattgt
tttgataacgatggcaagaaatggattatcggaaatactttatattctggtaattcaatactctataaggtcagaaaaaatt
tcactagttcgttctacaattacgtaatgaagatagatcacaaatcacacaagccattgttgtctgaaatacgattctatat
atctgtattggatcctttgactatcgacaactggacacgggaacgtggtataaagtatttggctattccagatctgtatgga
attggagaaaccgatgattatatgttcttcgttataaagaatttgggaagagtattcgccccaaaggatactgaatcagt
cttcgaagcatgcgtcactatgataaacacgttagagtttatacactctcgaggatttacccatggaaaaatagaaccg
aggaatatactgattagaaataaacgtctttcactaattgactattctagaactaacaaactatacaagagtggaaact
cacatatagattacaacgaggacatgataacttcaggaaatatcaattatatgtgtgtagacaatcatcttggagcaac
agtttcaaaacgaggagatttagaaatgttgggatattgcatgatagaatggttcggtggcaaacttccatggaaaaac
gaaagtagtataaaagtaataaaacaaaaaaaagaatataaaaaatttatagctactttctttgaggactgttttcctga
aggaaatgaacctctggaattagttagatatatagaattagtatacacgttagattattctcaaactcctaattatgacag
actacgtagactgtttatacaagattgaaatattctttttttatagagtgtggtagtgttacggatatctaatattaatattaga
ctatctctatcgcgctacacgaccaatatcgattactatggatatcttctatgaaaggagagaatgtattcatttctccagc
gtcaatctcgtcagtattgacaatactgtattatggagctaatggatccactgctgaacagctatcaaaatatgtagaaa
aggaggagaacacggataaggttagcgctcagaatatctcattcaaatccatgaataaagtatatgggcgatattctg
ccgtgtttaaagattcctttttgagaaaaattggcgataagtttcaaactgttgacttcactgattgtcgcactatagatgca
atcaacaagtgtgtagatatctttactgaggggaaaatcaatccactattggatgaacaattgtctcctagcaattagtgc
cgtatactttaaagcaaaatggttgacgccattcgaaaaggaatttaccagtgattatcccttttacgtatcaccaacgg
aaatggtagacgtaagtatgatgtctatgtacggcgagctatttaatcacgcatctgtaaaagaatcattcggtaactttt
caatcatagaactgccatatgttggagatactagtatgatggtcattcttccagacaagattgatggattagaatccata
gaacaaaatctaacagatacaaattttaagaaatggtgtaactctctggaagctacgtttatcgatgttcacattcccaa
gtttaaggtaacaggctcgtataatctggtggatactctagtaaagtcaggactgacagaggtgttcggttcaactgga
gattatagcaatatgtgtaatttagatgtgagtgtcgacgctatgatccacaaaacgtatatagatgtcaatgaagagtat
acagaagcagctgcagcaacttgtgcactggtgtcagactgtgcatcaacaattacaaatgagttctgtgtagatcatc
cgttcatctatgtgattaggcatgttgatggaaaaatttttttcgttggtagatattgctctccgacaactaattgttaaccattt
tttttaaaaaaatagaaaaaacatgtggtattagtgcaggtcgttattcttccaattgcaattggtaagatgacggccaac
tttagtacccacgtcttttcaccacagcactgtggatgtgacagactgaccagtattgatgacgtcaaacaatgtttgact
gaatatatttattggtcgtcctatgcataccgcaacaggcaatgcgctggacaattgtattccacactcctctcttttagag
atgatgcggaattagtgttcatcgacattcgcgagctggtaaaaaatatgccgtgggatgatgtcaaagattgtgtaga
aatcatccgttgttatataccggatgagcaaaaaaccatcatcggactttgtgcatatgctgctacttactggggaggtg
aagaccatcccactagtaacagtctgaacgcattgtttgtgatgcttgagatgctaaattacgtggattataacatcatatt
ccggcgtatgaattgatgagttgtacatcttgacattttcttctttcttctcttctccctttcccagaaacaaactttttttacccac
tataaaataaaatgagtatactacctgttatatttctttctatatttttttattcttcattcgttcagacttttaacgcgcctgaatgt
atcgacaaagggcaatattttgcatcattcatggagttagaaaacgagccagtaatcttaccatgtcctcaaataaata
cgctatcatccggatataatatattagatattttatgggaaaaacgaggagcggataatgatagaattataccgatagat
aatggtagcaatatgctaattctgaacccgacacaatcagactctggtatttatatatgcattaccacgaacgaaacct
actgtgacatgatgtcgttaaatttgacaatcgtgtctgtctcagaatcaaatatagatcttatctcgtatccacaaatagta
aatgagagatctactggcgaaatggtatgtcccaatattaatgcatttattgctagtaacgtaaacgcagatattatatgg
agcgggcatcgacgccttagaaataagagacttaaacaacggacacctggaattattaccatagaagatgttagaa
aaaatgatgctggttattatacatgtgttttagaatatatatacggtggcaaaacatataacgtaaccagaattgtaaaat
tagaggtacgggataaaataataccttctactatgcaattaccagaaggtgttgtaacttcaataggtagtaatttgacta
ttgcgtgtagagtatcgttgagacctcccacaacggatgcagacgtcttttggataagtaatggtatgtattacgaagaa
gatgatggggacggagacggtagaataagtgtagcaaataaaatctatatgaccgataagagacgtgttattacatc
ccggttaaacattaatcctgtcaaggaagaagatgctacaacgtttacgtgtatggcgtttactattcctagcatcagca
aaacagttactgttagtataacgtgaatgtatgttgttacatttccatgtcaattgagtttataagaatttttatacattatcttcc
aacaaacaattgacgaacgtattgctatgattaactcccacgatactatgcatattattaatcattaacttgcagactata
cctagtgctattttgacatactcatgttcttgtgtaattgcggtatctatattattaaagtacgtaaatctagctatagttttattat
ttaattttagataatataccgtctccttatttttaaaaattgccacatcctttattaaatcatgaatgggaatttctatgtcatcgtt
aatatattgtgaacaacaagagcagatatctataggaaagggtggaatgcgatacattgatctatgtagttttaaaaca
cacgcgaactttgaagaatttatataaatcattccatcgatacatccttctatgttgacatgtatatatccaggaattcttttat
taatgtcaggaaatgtataaactaaaacattgcccgaaagcggtgcctctatctgcgttatatccgttcttaacttacaaa
atgtaaccaatacctttgcatgacttgttttgttcggcaacgttagtttaaacttgacgaatggattaattacaatagcatga
tccgcgcatctattaagtttttttactttaacgcccttgtatgtttttacagagactttatctaaatttctagtgcttgtatgtgttata
aatataacgggatatagaactgaatcacctaccttagatacccaattacattttatcagatccagataataaacaaatttt
gtcgccctaactaattctatattgttatatattttacaattggttatgatatcatgtaataacttggagtctaacgcgcatcgtc
gtacgtttatacaattgtgatttagtgtagtatatctacacatgtatttttccgcactatagtattctggactagtgataaaact
atcgttatatctgtcttcaatgaactcatcgagatattgctctctgtcatattcatacacctgcataaactttctagacatctta
caatccgtgttattttaggatcatatttacatatttacgggtatatcaaagatgttagattagttaatgggaatcgtctataata
atgaatattaaacaattatatgaggacttttaccacaaagcatcataaaaatgagtcgtcgtctgatttatgttttaaatatc
aaccgcgaatcaactcataaaatacaagagaatgaaatatatacatattttagtcattgcaatatagaccatacttctac
agaacttgattttgtagttaaaaactatgatctaaacagacgacaacctgtaactgggtatactgcactacactgctattt
gtataataattactttacaaacgatgtactgaagatattattaaatcatggagtggatgtaacgatgaaaaccagtagcg
gacgtatgcctgtttatatattgcttactagatgttgtaatatttcacatgatgtagtgatagatatgatagacaaagataaa
aaccacttatcgcatagagactattccaacctactactagagtatataaaatctcgttacatgttattgaaggaagagga
tatcgatgagaacatagtatccactttattagataagggaatcgatcctaactttaaacaagacggatatacagcgttac
attattattatttgtgtctcgcacacgtttataaaccaggtgagtgtagaaaaccgataacgataaaaaaggccaagcg
aattatttctttgtttatacaacatggagctaatctaaacgcgttagataattgtggtaatacaccattccatttgtatcttagt
attgaaatgtgtaataatattcatatgactaaaatgctgttgacttttaatccgaatttcaaaatatgtaataatcatggatta
acgcctatactatgttatataacttccgactacatacaacacgatattcttgttatgttaatacatcactatgaaacaaatgt
tggagaaatgccgatagatgagcgtcgtataatcgtattcgagtttatcaaaacatattctacacgtccggcagattcga
taacttatttgatgaataggtttaaaaatatagatatttatacccgctatgaaggaaagacattattacacgtagcatgtga
atataataatacacacgtaatagattatcttatacgtatcaacggagatataaatgcgttaaccgacaataacaaacac
gctacacaactcattatagataacaaagaaaattccccatataccattaattgtttactgtatatacttagatatattgtaga
taagaatgtgataagatcgttggtggatcaacttccatctctacctatcttcgatataaaatcatttgagaaattcatatcct
actgtatacttttagatgacacattttacaatagacacgttaggaatcgcaattctaaaacgtatcgatacgcattttcaaa
atacatgtcgtttgataaatacgatggtataataactaaatgtcataaagaaacaatattgctcaaactatccactgttct
agacactacactatatgcagttttaagatgccataattcgaaaaagttaagaagatacctcaacgagttaaaaaaata
taataacgataagtcctttaaaatatattctaatattatgaatgagagataccttaatgtatattataaagatatgtacgtgt
caaaggtatatgataaactatttcctgttttcacagataaaaattgtctactaacattactaccttcagaaattatatacgaa
atattatacatgctgacaattaacgatctttataatatatcgtatccacctaccaaagtatagttgtatttttctcatgcgatgt
gtgtaaaaaaactgatattatataaatattttagtgccgtataatgaagatgacgatgaaaatgatggtacatatatatttc
gtatcattattgttattgctattccacagttacgccatagacatcgaaaatgaaatcacagaattcttcaataaaatgaga
gatactctaccagctaaagactctaaatggttgaatccagcatgtatgttcggaggcacaatgaatgatatagccgctc
taggagagccattcagcgcaaagtgtcctcctattgaagacagtcttttatcgcacagatataaagactatgtggttaaa
tgggagaggctagaaaaaaatagacggcgacaggtttctaataaacgtgttaaacatggtgatttatggatagccaa
ctatacatctaaattcagtaaccgtaggtatttgtgtaccgtaactacaaagaatggtgactgtgttcagggtatagttag
atctcatattaaaaaacctccttcatgcattccaaaaacatatgaactaggtactcatgataagtatggcatagacttata
ctgtggaattctttacgcaaaacattataataatataacttggtataaagataataaggaaattaatatcgacgatattaa
gtattcacaaacgggaaagaaattaattattcataatccagagttagaagatagtggaagatacaactgttacgttcatt
acgacgacgttagaatcaagatgtaaaatacttacggttataccgtcgcaagaccacaggtttaaactaatactagat
ccaaaaatcaacgtaacgataggagaacctgccaatataacatgcactgctgtgtcaacgtcattattgattgacgat
gtactgattgaatgggaaaatccatccggatggcttataggattcgattttgatgtatactctgttttaactagtagaggcg
gtatcaccgaggcgaccttgtactttgaaaatgttactgaagaatatataggtaatacatataaatgtcgtggacacaa
ctattattttgaaaaaacccttacaactacagtagtattggagtaaatacacaatgcatttttatatacattactgaataatt
attattattatttatatcgtatttgtgctataacgcgactatctaggtatttgtatctcaccgatagagaacatataaatgtaga
ctctattaaacagttgtgtaaaatatcagatcctaatagatgtggatgtacggctttagaaatgagttcattaaaatatgtg
atatcaacggaacatatttatataattatactattgctgttagtataattattgattccacggaagaactaccaacagttact
ccaattacaacaacatataattatactatcgatgatagcactactgaagaactacaagtgactcctcatatggatctcca
tcgatgatacatgtattaaaatactttccgaataagtcttttaaatattgtattaattatgaaaaactatgctatgcgagtatg
atacgatactagattttatctctagcgagagatgtcgttagaatcatttatcaacgaatatcgataacatgtgtcatttatac
gttaaagtctgtccgtcttctctattgtttagactgtttgtagaatgctgtgatataaacaaactagtagacacaaatatttaa
ctcatgatgaagttgagaatgatatgctttagctaatataaaaatatattaatccactatatattctagacttgatttaaaac
cgataaactactactacgtactgtataagttaggagcagaccctaattatgtagatgatagaggtaatacttctgcatcta
tatgtccacttatgagaaaacgtcatttaataagatgcatcgtgaaaagaaatttattaaagagttggtaaaatatgaaa
ccgaaagtaaataatataggaaatacacctctacataactacgtatctcaatatgatatcactctcattcctcatccaca
acccattaaaaaatggaaattaaagccctctattagcataaacggctacaggtctacctttacaatggcctttccttgtgc
ccagttcagaccctgtcattgccacgctactaaggactccctgaataccgtggccgacgtcagacattgtctgactgaa
tacatcctgtgggtttctcatagatggacccatagagaaagcgcagggtctctctacaggcttctcatctctttcagaact
gatgcaacggagctctttggtggtgagttgaaggattcacttccgtggagatcattaaatgactccatgaaaaccgccg
aagaacttcgtgcaatcattggactttgtactcaatcagctatcgtctctggaagagtcttcaacgataagtatatcgaca
tactacttatgctgcgaaagattctgaacgagaacgactatctcaccctcttggatcatatccgcactgctaaatactaa
atctccttcatgctctctcactacactttttatcatcttatgaggaataattagcaccagaatagctatggattgcacatgtatt
ctatgtcgtctactggatgaagatgtgacgtacaaaaaaataaaactagaaattgaaacgtgtcacaacttatcaaaa
catatagatagacgaggaaacaatgcgctacattgttacgtctccaataaatgcgatacagacattaagattgttcgac
tgttactctctcgcggagtcgagagactttgtagaaacaacgaaggattaactccgctaggagcatacagtaagcata
gatacgtaaaatctcagattgtgcatctactgatatccagctattcgaattcctctaacgaactcaagtcgaatataaatg
atttcgacttacgtctgctaaaatacctaattgtggataaacggatacgtccgtccaagaatacgaattatgcaatcaat
ggtctcggattggtggatatatacgtaacgacgcctaatccgagaccagaagtattgctatggcttcttaaatcagaatg
ttacagcaccggttacgtatttcgtacctgtatgtacaacagtgatatgtgtaagaactctcttcattactatatatcgtctca
tagagaatctctatccaaggatgtaattaaatgtttgatcgataacaatgtttccatccaatactactggtcttgctcaacc
atagatatagagattattaataaaggatgtggacacgtgtagagtatacgacgtcagccctatattagaggcgtattatc
taaacaagcgatttagagtaaccccatataatgtagacatggaaatcgttaatcttcttattgagagacgtcatactcttgt
cgacgtaatgcgtagtattacttcgtacgattccagagaatataaccactacatcatcgataacattctaaagagattta
gacaacaggatgaatccatcgtacaagccatactgataaactacttacattacggcgatatggtaagtatacctatcat
tcaatgcatgttggataagacgacggacaacaactttgttaataataatctcgtcgatgtaaacgtcgtaaggtttatcgt
ggaaaatatggacacgcggctgtaaatcacatatctaacaatggccgtctatgtatgtacggtctgatattatcgagattt
aataattgcgggtatcactgttatgaagatgtatttgatatactaagcaagtacatggatgatatagatatgatcgataac
tctactatattacgcggtcgatgtcaataatatacaatttgcaaagcggttattggaatatggagcgagtgtcacgctcga
taatcaatacggccatccagaaaagcagttaccaaagagaagctagttgatttattactgagttaccatcccactctag
agactatgattgacgcatttaatagagatatacgctatctatatcctgaaccattattcgcctgtatcagatacgccttaat
cctagatgatgattttccttctaaagtaagtatgatatcgccggtcgtcataaggaactaaagcgctatagagcagacat
taatagaatgaagaatgcctacatatcaggcgtctccatgtttgatatattatttaaacgaagcaaacgccacagattga
gatacgcaaagaacaatgagaggatcgactccattaaataatttatcatggagtgataatgtcctgtttccatggcatat
tacaaaatcgattccgtccaagatgataaaaacatttaccggcatcataaacacggagtttattttatatgtctcgcataa
acattactaaaaaaatatattgttcggttttctttcacatctttaattatgaaaaagtaaatcattatgagatggacgcatcgt
tcgcgacagtatgtggtacatacctaacgtatttatggacgacggtaagaatgaaggtcacgtttctgtcaacaatgtcg
acgcgatcgtgtaacacgactcacaatagaatctgtgaatgctctcccgatcatggatgcaaggcatgtgtttcccaaa
caaaatgtggaataggatacggagtatccggagacgtcatctgttctccgtgtggtctcggaacatattctcacaccgtc
tcttccgcagataaatgcgaacccgtacccagaaatacctttaactatatcgatgtggaaattaacctgtatccagttaa
cgacacatcgtgtactcggacgaccactaccggtctcagcgaatccatctcaacgtcggaactaactattactatgaat
cataaagactgcgatcccgtcttcttaataaggtagcgacttcaggtttctttacaggagaaaggtgtgcactctgaattt
cgagattaaatgcaataacaaagattcttcctccaaacagttaacgaaagcaaagaatgatactatcatgccgcattc
ggagacagtaactctagcgtcgacatctatatactatatagtaataccaatactcaagactacgaaactgatacaatct
cttatcatgtgggtaatgtagccatatgcccggtagttgcgatatacataaactgatcactaattccaaacccacccgctt
tttatagtaagtttttcacccataaatacaataattaatttctcgtaaaagtagaaaatatattctaatttattgcacggtaag
gaagtagaatcataaagaacagtactcaatcaatagcaatcatgaaacaatatatcgtactggcatgcatgtgcctgc
cagtcttcagcaatcatcctcatcgtgtacggaagaagaaaacaaacatcatatgggaatcgatgttattatcaaagtc
acaaagcaagaccaaacaccgaccgatgataagatttgccaatccgtaacggaaattacagagtccgagtcagat
ccagatcccgaggtggaatcagtcgaggatgtagatcctcctaccacttattactccatcatcggtggaggtctgagaa
tgaactttggattcaccaaatgtcctcagattaaatccatctcagaatccgctgatggaaagactgtgaggtgtctatcg
acatcagatgtagcgaagaagagaaagacagcgacatcaagacccatccagtactcgggtctaacatctctcataa
gaaagtgagttacgaagatatcatcggttcaacgatcgtcgatacaaaatgtgtcaagaatctagagtttagcgttcgt
atcggagacatgtgcaaggaatcatctgaacttgaggtcaagtatgtcgacggatcggcatctgaaggtgcaaccga
tgatacttcactcatcgattcaacaaaactcaaagcgtgtgtctgaatcgataactctattcatctgaaattggatgagta
gggttaatcgaacgattcaggcacaccacgaattaaaaaagtgtaccggacactatattccggtttgcaaaacaaaa
agttacctctcgcgacttcttctttttctgtctcaatagtgtgatacgattatgacactattcctatttcctttcagggtatcacaa
aaatattaaacctctttctgatggtctcatacaaaaatatttttattctctttctctctttgatggtctcataaaaaatatttttattct
ctttctctctttgatggtctcataaaatatttttattctctttctctctttgatggtctcataaaaaatatttttattctctttctctctttga
tggtctcataaaatatttttattctctttctctctttgatggtctcataaaaaatatttttattctctttctctctttgatggtctcataaa
aaatattaaacctctttctgatggtgtcactaaaatatttttattctctttctctcttcaatggagtcataaaatatttttattctcttt
ctctcttcgatggtctcacaaaaatattaaacctctttctgatggtgtcactaaaatatttttattctctttctctcttcaatggagt
cataaaatatttttattctctttctctctttgatggtctcacaaaaatatttttattctctttctctctttgatggtctcacaaaaatatt
tttattctctttctctctttgatggtctcacaaaaatatttttattctctttctctctttgatggtctcataaaaaaagttttacaaaaa
tatttttattctctttctctctttgatggtctcataaaaaaagttttacaaaaatatttttattctctttctctctttgatggtctcataaa
aaaagttttacaaaaatatttttattctctttctctctttgatggtctcataaaaaatattaaacctctttctgatggtgtcactaa
aatatttttattctcattctctcttcaatggagtcataaaatatttttattctctttctctcttcgatggtctcacaaaaatattaaac
ctctttctgatggtgtcactaaaatatttttattctcattctctcttcaatggagtcataaaatatttttattctctttctctcttcgatg
gtctcacaaaaatattaaacctctttctgatggtgtcactaaaatatttttattctcattctctcttcaatggagtcataaaatat
ttttattctctttctctctttgatggtctcataaaaaaagttttacaaaaatatttttattctctttctctctttgatggtctcataaaaa
atattaaacctctttctgatggtgtcactaaaatatttttattctctttctctcttcaatggagtcataaaatatttttattctctttctc
tcttcgatggtctcacaaaaatattaaacctctttctgatggtgtcactaaaatatttttattctcattctctcttcaatggagtc
ataaaatatttttattctctttctctctttgatggtctcataaaaaaagttttacaaaaatatttttattctctttctctctttgatggtct
cataaaaaaagttttacaaaaatatttttattctctttctctctttgatggtctcataaaaaaagttttacaaaaatatttttattct
ctttctctctttgatggtctcataaaaaaagttttacaaaaatatttttattctctttctctctttgatggtctcataaaaaatattaa
acctctttctgatggtgtcactaaaatatttttattctcattctctcttcaatggagtcataaaatatttttattctctttctctcttcga
tggtctcacaaaaatattaaacctctttctgatggtgtcactaaaatatttttattctcattctctcttcaatggagtcataaaat
atttttattctctttctctctttgatggtctcataaaaaaagttttacaaaaatatttttattctctttctctctttgatggtctcataaa
aaaagttttacaaaaatatttttattctctttctctctttgatggtctcataaaaaaagttttacaaaaatatttttattctctttctct
ctttgatggtctcataaaaaaagttttacaaaaatatttttattctctttctctctttgatggtctcacaaaaatattaaacctcttt
ctgatggagtcgtaaaaaagttttatctctttctccttcgatggtctcacaaaaatattaaacctctttctgatggagtcgtaa
aaaagttttatctctttctctcttcgatggtctcacaaaaatattaaacctctttctgatggagtcgtaaaaaagttttatctcttt
ctctcttcgatggtctcactaaaatattttttattctctttctgatgcatcaactatttcttaaacaataacgtccaacaacatat
actcgtcgagcttatcaacatcccctatgcccatctaggttaccagacaattgtatatcataaaataatgtttataatttttac
aaaaatatttttattctctttctctctttgatggtctcataaaaaaagttttacaaaaatatttttattctctttctctctttgatggtct
cataaaaaatattaaacctctttctgatggtgtcactaaaatatttttattctcattctctcttcaatggagtcataaaatattttt
attctctttctctcttcgatggtctcacaaaaatattaaacctctttctgatggtgtcactaaaatatttttattctcattctctcttc
aatggagtcataaaatatttttattctctttctctctttgatggtctcataaaaaaagttttacaaaaatatttttattctctttctctc
tttgatggtctcataaaaaaagttttacaaaaatatttttattctctttctctctttgatggtctcataaaaaaagttttacaaaa
atatttttattctctttctctctttgatggtctcataaaaaaagttttacaaaaatatttttattctctttctctctttgatggtctcataa
aaaaagttttacaaaaatatttttattctctttctctctttgatggtctcataaaaaaagttttacaaaaatatttttattctctttct
ctctttgatggtctcataaaaaaagttttacaaaaatatttttattctctttctctctttgatggtctcataaaaaatattaaacct
ctttctgatggtgtcactaaaatatttttattctctttctctcttcaatggagtcataaaatatttttattctctttctctcttcgatggt
ctcacaaaaatattaaacctctttctgatggtgtcactaaaatatttttattctcattctctcttcaatggagtcataaaatatttt
tattctctttctctctttgatggtctcataaaaaaagttttacaaaaatatttttattctctttctctctttgatggtctcataaaaaa
agttttacaaaaatatttttattctctttctctctttgatggtctcataaaaaaagttttacaaaaatatttttattctctttctctctttg
atggtctcataaaaaaagttttacaaaaatatttttattctctttctctctttgatggtctcataaaaaaagttttacaaaaatat
ttttattctctttctctctttgatggtctcataaaaaatattaaacctctttctgatggtgtcactaaaatatttttattctctttctctct
tcaatggagtcataaaatatttttattctctttctctcttcgatggtctcacaaaaatattaaacctctttctgatggtgtcacta
aaatatttttattctctttctctcttcaatggagtcataaaatatttttattctctttctctctttgatggtctcataaaaaaagttttac
aaaaatatttttattctctttctctctttgatggtctcataaaaaaagttttacaaaaatatttttattctctttctctctttgatggtct
cataaaaaaagttttacaaaaatatttttattctctttctctctttgatggtctcataaaaaaagttttacaaaaatatttttattct
ctttctctctttgatggtctcataaaaaaagttttacaaaaatatttttattctctttctctctttgatggtctcataaaaaaagtttt
acaaaaatatttttattctctttctctctttgatggtctcataaaaaaagttttacaaaaatatttttattctctttctctctttgatggt
ctcataaaaaatattaaacctctttctgatggtgtcactaaaatatttttattctcattttctctttctctcttcaatggagtcataa
aatatttttattctctttctctctttgatggtctcataaaaaatattaaacctctttctgatggtgtcactaaaatatttttattctcatt
ctctcttcaatggagtcataaaaaagttttatctctttctctcttcgatggtctcacaaaaatattaaacctctttctgatggag
tcgtaaaaaagttttatctctttctctcttcgatggtctcacaaaaatattaaacctctttctgatgcatcaactatttcttaaac
aataacgtccaacaacatatactcatcccctatgcccatctaggttaccagacaattgtatatcataaaataatgtttata
atttacacgttaaaatcatataataaaacgtagatcgtataatattttttggtatataaatgatctagtaaaatccatgtagg
ggatactgctcacattttttctttggtacaaaatttcacacaagtttttatacagacaaattcttgtccatatattttaaaacatt
gacttttgtactaagaaaaatatctagactaactatctctttctctttctctcttcgatggtctttctgatggagtcgtaaaaaa
gttttatctctttctctcttcgatggtctcacaaaaatattaaacctctttctgatggagtcgtaaaaaagttttatctctttctctct
tcgatggtctcacaaaaatattaaacctctttctgatggagtcgtaaaaaagttttatctctttctccttcgatggtctcacaa
aaatattaaacctctttctgatggagtcgtaaaaaagttttatctctttctctcttcgatggtctcacaaaaatattaaacctct
ttctgatggtgtcactaaaatatttttattctctttctctcttcgatggtctcacaaaaatattaaacctctttctgatggagtcgt
aaaaaagttttatctctttctccttcgatggtctcacaaaaatattaaacctctttctgatggagtcgtaaaaaagttttatctc
tttctctcttcgatggtctcacaaaaatattaaacctctttctgatggagtcgtaaaaaagttttatctctttctccttcgatggtc
tcacaaaaatattaaacctctttctgatggagtcgtaaaaaagttttatctctttctccttcgatggtctcacaaaaatattaa
acctctttctgatggagtcgtaaaaaagttttatctctttctccttcgatggtctcacaaaaatattaaacctctttctgatgga
gtcgtaaaaaagttttatctctttctctcttcgatggtctcacaaaaatattaaacctctttctgatggagtcgtaaaaaagttt
tatctctttctctcttcgatggtctcacaaaaatattaaacctctttctgatggagtcgtaaaaaagttttatctctttctccttcg
atggtctcacaaaaatattaaacctctttctgatggtctctataaagcgattgatttttcttaccctctagagtttcctacggtc
gttggtcacacatttttttctagacactaaataaatagtaagattaaattaattataaaattatgtatataatattaattataaa
attatgtatatgatttactaactttagttagataaattaataatacataaattttagtatattaatattataaattaataatacata
aattttagtatattaatattatattttaaatatttatttagtgtctagaaaaaaaggccggcctagcaggcc

[0074] Alternatively, the sequence of sMVA F3 may contain 1 nucleotide alteration in a non-coding determining region at 88 bp close to the end of the ITR sequence (deposited with NCBI under Accession No. MW030459, www.ncbi.nlm.nih.gov/nuccore/MW030459.1/) (SEQ ID NO: 15):

ggcctagcaggcctttttttctagacactaaataaatagtaagattaaattaattataaaattatgtatataatattaattata
aaattatgtatatgatttactaactttagttagataaattaataatacataaattttagtatattaatattataaattaataat
acataaattttagtatattaatattatattttaaatatttatttagtgtctagaaaaaaaggccggccgggtattaataatatc
tatatttccagcgttaagtgtaacattaaacagttttaattcacgtgacgtggtatcaattaaataattaatgcccaatttgga
tatagcagcctgaagctcatcttgtttagttacggatcctaatgagttattaagcaatatatcgaacggatgaacgaaggttgt
tttaagttggtcacatactttgtaatctagacatagatgcggaagaacggtagaaactatacgaaataaatattcagagtcctc
taattgatcaagagtaactattgacttaataggcatcatttatttagtattaaatgacgaccgtaccagtgacggatatacaaa
acgatttaattacagagttttcagaagataattatccatctaacaaaaattatgaaataactcttcgtcaaatgtctattctaa
ctcacgttaacaacgtggtagatagagaacataatgccgccgtagtgtcatctccagaggaaatatcctcacaacttaatgaag
atctatttccagatgatgattctccggccactattatcgaacgagtacaacctcatactactattattgacgatactccacctc
ctacgtttcgtagagagttattgatatcggaacaacgtcaacaacgagaaaaaagatttaatattacagtatcgaaaaatgctg
aagcaataatggaatctagatctatgatatcttctatgccaacacaaacaccatccttgggagtagtttatgataaagataaaa
gaattcagatgttggaggatgaagtggttaatcttagaaatcaacgatctaatacaaaatcatctgataatttagataatttta
ccagaatactatttggtaagactccgtataaatcaacagaagttaataagcgtatagccatcgttaattatgcaaatttgaacg
ggtctcccttatcagtcgaggacttggatgtttgttcagaggatgaaatagatagaatctataaaacgattaaacaatatcacg
aaagtagaaaacgaaaaattatcgtcactaacgtgattattattgtcataaatattatcgagcaagcattgctaaaactcggat
ttgaagaaatcaaaggactgagtaccgatatcacttcagaaattatcgatgtggagatcggagatgactgcgatgctgtagcat
caaaactaggaatcggtaacagtccggttcttaatattgtattgtttatactcaagatattcgttaaacgaattaaaattattt
aatttaatacattcccatatccagacaacaatcgtctggattaatctgttcctgtcgtctcataccggacgacatattaatctt
tttattagtaggcatctttttagatggtttctttttcccagcattaactgagtcgatacctagaagatcgtgattgatctctcc
gaccattccacgaacttctaattggccgtctctgacggtaccataaactattttaccagcattagtaacagcttggacaatctg
accatccatcgcattgtacgatgtagtagtaactgttgttctacgtctaggagcaccagaagtatttttggagcccttggatgt
tgatgtagaagaagacgaggattttgattttggtttacatgtaatacattttgtatcacatgcgccggcagtcacatctgtttg
agaattaagattattgttgcctcctttgacggctgcatctccaccgatttgcgctagtagatttttaagctgtggtgtaatctt
attaactgtttcgatataatcatcgtaactgcttctaacggctaaattttttttatccgccatttagaagctaaaaatattttt
atttatgcagaagatttaactagattatacaatgaactaatatgatccttttccagattatttacaaacttggtattttttggt
tctggaggaggcgaatttaaattcggacttggatttggattttgtgggttcttgatcttattatacagcgcatataggatggcg
acggtaactgctacgcaaataccgatcaacaaaagaataccaatcatttattgacaataacttcactattgatcaagtatgcaa
tatatcatcttttcactaaataagtagtaataatgattcaacaatgtcgagatatatggacgataataatttagttcatggaaa
tatcgctatgattggtatgaatgactccgctaactctgtggggcgcgcagtgctttccccacatagaataaattagcattccga
ctgtgataataataccaagtataaacgccataatactcaatactttccatgtacgagtgggactggtagacttactaaagtcaa
taaaggcgaagatacacgaaagaatcaaaagaatgattccagcgattagcacgccggaaaaataatttccaatcataagcatca
tatccatttaactaataaaaattttaaatcgccgaatgaacaaagtggaatataaaccatataaaaacaatagtttgtactgca
aaaataatatctatttttgttttcgaagatatggtaaaattaaatagtagtacacagcatgttataactaacagcagcaacggc
tcgtaattacttatcatttactagacgaaaaggtggtgggatattttcttgctcaaataatacgaatatatcacccatccattt
tatgcgatgtttatatactctaatctttaatagatctatagacgacgggtttaccaacaatatagattttatcgattcatctaa
tttaaacccttccttaaacgtgaatgatctattatctggcataacgatgactctacccgatgaatcggacaatgtactgggcca
tgtagaataaattatcaacgaattatcgtctacgaacatttatatcatttgttttaattttagtacgcgaataaatagatataa
aatagaaaataacagatattacaaccaatgttatggccgcgcccaaccaggtaggcagttttattttatcttttactacaggtt
ctcctggatgtacgtcaccaacggcggacgtagttctagtacaattagacgtaagttccgcttgggaattttttaacgctaaag
agttaacgttaatcgtgcacccaacgtatttacatctagttctttgaacatcttgattataatataaccattttctatctctag
attcgtcggtgcactcatgtaaccaacataccctaggtcctaaatatttatctccggaattagattttggataattcgcgcacc
aacaatttctatttcctttatgatcgttacaaaagacgtataatgccgtatccccaaaagtaaaataatcaggacgaataattc
taataaactcagaacaatatctcgcatccatatgtttggagcaaatatcggaataagtagacatagccggtttccgttttgcac
gtaaccattctaaacaattggggtttccaggatcgtttctacaaaatccagtcatgaaatcatcacaatgttctgtcttgtaat
tattattaaatatttttggacagtgtttggtatttgtcttagaacaacattttgccacgctatcactatcgcccaggagataat
ccttttttataaaatgacatcgttgcccggatgctatataatcagtagcgtgttttaaatccttaatatattcaggagttacct
cgttctgataatagattaatgatccaggacgaaatttgaaagaactacatggttctccatgaattaatacatattgtttagcaa
attcaggaactataaaactactacaatgatctatcgacataccatctatcaaacaaaacttgggtttaatttctcccggagatg
tttcataatagtacgtataactttcttctgcaaacttaacagctctattatattcaggataattaaaacctaattccatatatt
tgtctcgtatatctgctattcctggtgctattttgattctattaagagtaacggctgcccccatttttaataatcgtcagtatt
taaactgttaaatgttggtatatcaacatttaccttatttcccgcagtataaggtttgttgcaggtatactgttcaggaatggt
tacatttatactttttctatagtcctgtctttcgatgttcatcacatatgcaaagaacagaataaacaaaataatgtaagaaat
aatattaaatatctgtgaattcgtaaatacattgattgccataataattacagcagctacaatacatacaatagacattcccac
agtgttgccattacctccacgatacatttgagttactaagcaataggtaataactaagctagtaagaggcaatagaaaagatga
gataaatatcatcaatatagagattagaggagggctatatagagccaagacgaacaaaatcaaaccgagtaacgttctaacatc
attatttttgaagattcccaaataatcattcattcctccataatcgttttgcatcatacctccatctttaggcataaacgattg
ctgctgttcctctgtaaataaatctttatcaagcactccagcacccgcagagaagtcgtcaagcatattgtaatatcttaaata
actcatttatatattaaaaaatgtcactattaaagatggagtataatctttatgccgaactaaaaaaaatgacttgtggtcaac
ccctaagtctttttaacgaagacggggatttcgtagaagttgaaccgggatcatcctttaagtttctgatacctaagggatttt
acgcctctccttccgtaaagacgagtctagtatttgaaacattaacaacgaccgataataaaattactagtatcaatccaacaa
atgcgccaaagttatatcctcttcaacgcaaagtcgtatctgaagtagtttctaatatgaggaaaatgatcgaatcaaaacgtc
ctctatacatcactcttcacttggcgtgtggatttggtaagactattaccacgtgttatcttatggctacacacggtagaaaaa
ccgtcatttgcgtacccaataaaatgttaatacatcaatggaagacacaggtagaggcagtcggattggaacataagatatcca
tagatggagtaagtagtctattaaaggaactaaagactcaaagtccggatgtattaatagtagtcagtagacatctgacaaacg
atgccttttgtaaatatatcaataagcattatgatttgttcatcttggatgaatcacatacgtataatctgatgaacaatacag
cagttacaagatttttagcgtattatcctccgatgatgtgttattttttaactgctacacctagaccatctaacagaatttatt
gtaacagtattattaatattgccaagttatccgatctaaaaaaaactatctatgcagtagatagtttttttgagccatattcca
cagataatattagacatatgataaaacgattagatggaccatctaataaatatcatatatataccgagaagttattatctgtag
acgagcctagaaatcaacttattcttaataccctggtagaagaattcaagtcaggaactattaatcgcattttagttattacta
aactacgtgaacatatggtattcttctacaaacgattattagattttttcggatcagaggttgtatttataggagacgcccaaa
atagacgtactccagatatggtcaaatcaatcaaggaactaaatagatttatattcgtatccaccttattttattccggtactg
gtttagatattcctagtttggattctttgttcatttgctcggcagtaatcaacaatatgcaaatagagcaattactagggaggg
tatgtcgagaaacagaactattagataggacggtatatgtatttcctagcacatccatcaaagaaataaagtacatgataggaa
atttcgttcaacgaattattagtctgtctgtagataaactaggatttaaacaaaaaagttatcggaaacatcaagaatccgatc
ccacttctgtatgtacaacatcctccagagaagaacgtgtattaaatagaatatttaactcgcaaaatcgttaagaagtttaag
cgacgatccgcatgctgcgcaggccagtgtattacccctcatagtattaatataatccaatgatacttttgtgatgtcggaaat
cttaaccaatttagactgacaggcagaacacgtcatgcaatcatcatcgtcatcgataactgtagtcttgggcttctttttgcg
gctcttcattccggaacgcacattggtgctatccatttaggtagtaaaaaataagtcagaatatgccctatagcacgatcgtgc
aaaacctggtatatcgtctctatctttatcacaatatagtgtatcgacatctttattattattgacctcgtttatcttggaaca
tggaatgggaacatttttgttatcaacggccacctttgccttaattccagatgttgtaaaattataactaaacagtctatcatc
gacacaaatgaaattcttgtttagacgtttgtagtttacgtatgcggctcgttcgcgtctcattttttcagatattgcaggtac
tataatattaaaaataagaatgaaataacataggattaaaaataaagttatcatgacttctagcgctgatttaactaacttaaa
agaattacttagtctgtacaaaagtttgaaattttcagattctgcggctatagaaaagtataattctttggtagaatggggaac
atctacttactggaaaataggcgtgcaaaaggtagctaatgtcgagacgtcaatatctgattattatgatgaggtaaaaaataa
accgtttaatattgatccgggctattacattttcttaccggtatattttgggagcgtctttatttattcgaagggtaaaaatat
ggtagaacttggatctggaaactcttttcaaataccagatgatatgcgaagtgcgtgtaacaaagtattagacagcgataacgg
aatagactttctgagatttgttttgttaaacaatagatggataatggaagatgctatatcaaaatatcagtctccagttaatat
atttaaactagctagtgagtacggattaaacatacccaaatatttagaaattgaaatagaggaagacacattatttgacgacga
gttatactctattatagaacgctctttcgatgataaatttccaaaaatatccatatcgtatattaagttgggagaacttaggcg
gcaagttgtagactttttcaaattctcattcatgtatattgagtccatcaaggtagatcgtataggagataatatttttattcc
tagcgttataacaaaatcaggaaaaaagatattagtaaaagatgtagaccatttaatacgatccaaggttagagaacatacatt
tgtaaaagtaaaaaagaaaaacacattttccattttatacgactatgatggaaacggaacagaaactagaggagaagtaataaa
acgaattatagacactataggacgagactattatgttaacggaaagtatttctctaaggttggtagtgcaggcttaaagcaatt
gactaataaattagatattaatgagtgcgcaactgtcgatgagttagttgatgagattaataaatccggaactgtaaaacgaaa
aataaaaaaccaatcagcatttgatttaagcagagaatgtttgggatatccagaagcggattttataacgttagttaataacat
gcggttcaaaatagaaaattgtaaggttgtaaatttcaatattgaaaatactaattgtttaaataacccgagtattgagactat
atatggaaactttaaccagttcgtctcaatctttaatatcgtcaccgatgtcaaaaaaagattattcgagtgaaataatatgcg
cctttgatataggtgcaaaaaatcctgccagaactgttttagaagtcaaggataactccgttagggtattggatatatcaaaat
tagactggagttctgattgggaaaggcacatagctaaagatttgtcacaatatgaatacactacagttcttctagaacgtcagc
ctagaaggtcgccgtacgtcaaatttatctattttattaaaggctttttatatcatacatcggctgccaaagttatttgcgtct
cgcctgtcatgtctggtaattcatatagagatcgaaaaaagagatcggtcgaagcatttcttgattggatggacacattcggat
tgcgagactccgttccggatagacgcaaattagacgatgtagcggatagtttcaatttggctatgagatacgtattagataaat
ggaatactaattatacaccttataataggtgtaaatctagaaattacataaaaaaaatgtaataacgttagtaacgccattatg
gataatctatttacctttctacatgaaatagaagatagatatgccagaactatttttaactttcatctaataagttgcgatgaa
ataggagatatatatggtcttatgaaagaacgcatttcctcagaggatatgtttgataatatagtgtataataaagatatacat
catgccattaagaaactagtgtattgcgacatccaacttactaaacacattattaatcagaatacgtatccggtatttaacgat
tcttcacaagtgaaatgttgtcattatttcgatataaactcagataatagcaatattagctctcgtacagtagagatatttgag
agggaaaagtcatctcttgtatcatatattaaaactaccaataagaagagaaaggtcaattatggggaaataaagaaaactgta
catggaggcactaatgcaaattacttttccggtaaaaagtctgatgagtatctgagcactacagtcaggtccaacattaatcaa
ccttggatcaaaaccatttctaagagaatgagagtagatatcattaatcactctatagtaacgcgtggaaaaagctctatatta
caaactatagaaattatttttactaatagaacatgtgtgaaaatattcaaggattctactatgcacattattctatccaaggac
aaggatgaaaaggggtgtatacacatgattgacaaattattctatgtctattataatttatttctgttgttcgaggatatcatc
caaaacgagtactttaaagaagtagctaatgttgtaaaccacgtactcacggctacggcattagatgagaaattattcctaatt
aagaaaatggctgaacacgatgtttatggagttagcaatttcaaaatagggatgtttaacctgacatttattaagtcgttggat
cataccgttttcccctctctgttagatgaggatagcaaaataaagttttttaaggggaaaaagctcaatattgtagcattacga
tctctggaggattgtataaattacgtgactaaatccgagaatatgatagaaatgatgaaggaaagatcgactattttaaatagc
atagatatagaaacggaatcggtagatcgtctaaaagaattgcttctaaaatgaaaaaaaaacactaattcagaaatggatcaa
cgactcggatataagtttttggtgcctgatcctaaagccggagttttttatagaccgttacatttccaatatgtatcgtattct
aattttatattgcatcgattgcatgaaatcttgaccgtcaagcggccactcttatcgtttaagaataatacagaacgaattatg
atagaaattagcaatgttaaagtgactcctccagattactcacctataatcgcgagtattaaaggtaagagttatgacgcatta
gccacgttcactgtaaatatctttaaagaggtaatgaccaaagagggtatatccatcactaaaataagtagttatgagggaaaa
gattctcatttgataaaaattccgctactaataggatacgggaataaaaatccacttgatacagccaagtatcttgttcctaat
gtcataggtggagtctttatcaataaacaatctgtcgaaaaagtaggaattaatctagtagaaaagattacaacatggccaaaa
tttagggttgttaagccaaactcattcactttctcgttttcctccgtatcccctcctaatgtattaccgacaagatatcgccat
tacaagatatctctggatatatcacaattggaagcgttgaatatatcatcgacaaagacatttataacggtcaatattgttttg
ctgtctcaatatttatctagagtgagtctagaattcattagacgtagtttatcatacgatatgcctccagaagttgtctatcta
gtaaacgcgataatagatagtgctaaacgaattactgaatctattactgactttaatattgatacatacattaatgacctggtg
gaagctgaacacattaaacaaaaatctcagttaacgatcaacgagttcaaatatgaaatgctgcataactttttacctcatatg
aactatacacccgatcaactaaagggattttatatgatatctttactaagaaagtttctctactgtatctaccacacttctaga
tatccagatagagattcgatggtttgtcatcgcatcctaacgtacggcaaatattttgagacgttggcacatgatgaattagag
aattacataggcaacatccgaaacgatatcatgaacaatcacaagaacagaggcacttacgcggtaaacattcatgtactaaca
actcctggacttaatcatgcattttctagtctattgagtggaaagttcaaaaagtcagacggtagttatcgaacacatcctcac
tattcatggatgcagaatatttctattcctaggagtgttggattttatccggatcaagtaaagatttcaaagatgttttctgtc
agaaaataccatccaagtcaatatctttacttttgttcatcggacgttccggaaagaggtcctcaggtaggtttagtatctcaa
ttgtctgtcttgagttccattacaaatatactaacgtctgagtatttggatttggaaaagaaaatttgtgagtatatcagatca
tattataaagatgatataagttactttgaaacaggatttccaatcactatagaaaatgctctagtcgcatctcttaatccaaat
atgatatgtgattttgtaactgactttagacgtagaaaacggatgggattcttcggtaacttggaggtaggtattactttagtt
agggatcacatgaatgaaattcgcattaatattggagcgggaagattagtcagaccattcttggttgtggataacggagagctc
atgatggatgtgtgtccggagttagaaagcagattagacgacatgacattctctgacattcagaaagagtttccgcatgtcatc
gaaatggtagatatagaacaatttacttttagtaacgtatgtgaatcggttcaaaaatttagaatgatgtcaaaggatgaaaga
aagcaatacgatttatgtgactttcctgccgaatttagagatggatatgtagcatcttcactagtgggaatcaatcacaattct
ggacccagagctattcttggatgtgctcaagctaaacaagctatctcttgtctgagctcggatatacgaaataaaatagacaat
ggaattcatttgatgtatccagagaggccaatcgtgattagtaaggctttagaaacttcaaagattgcggctaattgcttcggc
caacatgttactatagcattaatgtcgtacaaaggtatcaatcaagaggatggaattatcatcaaaaaacaatttattcagaga
ggcggtctcgatattgttacagccaagaaacatcaagtagaaattccgttggaaaactttaataacaaagaaagagataggtct
aacgcctattcaaaattagaaagtaatggattagttagactgaatgctttcttggaatccggagacgctatagcacgaaatatc
tcatcaagaactcttgaagatgattttgctagagataatcagattagctttgatgtttccgaaaaatataccgatatgtacaaa
tctcgcgttgaacgagtacaagtagaacttactgacaaagttaaggtacgagtattaaccatgaaagaaagaagacccattcta
ggagacaaatttaccactagaacgagtcaaaagggaacagtcgcgtatatcgcggatgaaacggaacttccatacgatgaaaat
ggtatcacaccagatgtcattattaattctacatccatcttctctagaaaaactatatctatgttgatagaggttattttaaca
gccgcatattctgctaagccgtacaacaataagggagaaaaccgacctgtctgttttcctagtagtaacgaaacatccatcgat
acatatatgcaattcgctaaacaatgttatgagcattcaaatccgaaattgtctgatgaagaattatcggataaaatcttttgt
gaaaagattctctatgatcctgaaacggataagccttatgcatccaaagtattttttggaccaatttattacttgcgtctgagg
catttaactcaggacaaggcaaccgttagatgtagaggtaaaaagacgaagctcattagacaggcgaatgagggacgaaaacgt
ggaggaggtatcaagttcggagaaatggagagagactgtttaatagcgcatggtgcagccaatactattacagaagttttgaaa
gattcggaagaagattatcaagatgtgtatgtttgtgaaaattgtggagacatagcagcacaaatcaagggtattaatacatgt
cttagatgttcaaaacttaatctctctcctctcttaacaaaaattgataccacgcacgtatctaaagtatttcttactcaaatg
aacgccagaggcgtaaaagttaaattagatttcgaacgaaggcctccttcgttttataaaccattagataaagttgatctcaaa
ccgtcttttctggtgtaatattctagtttggtagtagatacatatcaatatcatcaaattcgagatccgaattataaaatgggc
gtggattgttaactatagaatcggacgtctgatattcgaaaatctgtggagttttaggttttggtggaggtgtaactgctactt
gggatactgaagtctgatattcagaaagctgggggatgttctggttcgacatccaccgatggtgtcacatcactaatcggttcg
gtaacgtctgtggacgatggaggcaccacttctacaggttctggttctttatcctcagtcatcaacggagctacttcaatgcga
ggaaatgtataatttggtaatggtttctcatgtggatctgaagaagaggtaagatatctactagaaagataccgatcacgttct
agttctcttttgtagaacttaactttttctttctccgcatctagttgatattccaacctcttcacgttcgcatgggttacctcc
gcagtttttacgagcgatttcacgttcagccttcatgcgtcttatagcatgaattcgcttatcgttatcgggtttagcttctgt
caccttagcaattccttttttattaaactctacataatcatatccatttctattgtttgttctaatataaacgagtatagcatc
attgctaaatttttcaatagtatcgaaaacagaatatcctaaaccatataatatatattcaggaacactcaaactaaatgtcca
ggattctcctaaatacgtaaactttaatagtgcgaaatcattcaaaaatctaccacttatagatagatagatagtacataaatg
cgtatagtagtctacctatctctttattatgaaaaccggcattacgatcatatatgtcgtgatatacctgtgatccgtttacgt
taaaccataaatacatgggtgatcctataaacatgaatttatttctaattctcagagctatagttaattgaccgtgtaatattt
gcttacatgcatacttgatacgatcattaataagatttttatcattgctcgttatttcagaatcgtatatataaggagtaccat
cgtgattcttaccagatattatacaaaatactatatataaaatatattgacccacgttagtaatcatgtaaatgtttaacgttt
taaattttgtattcaatgatccattatcatacgctagcatggtcttatgatattcattctttaaaatataatattgtgttagcc
attgcattggggctcctaatggagattttttattctcatccattttaggataggctttcataaagtccctaataacttcgtgaa
taatgtttctatgttttctactgatgcatgtatttgcttcgatttttttatcccatgtttcatctatcatagatttaaacgcag
taatgctcgcaacattaacatcttgaaccgttggtacaattccgttccataaatttataatgttcgccatttatataactcatt
ttttgaatatacttttaattaacaaaagagttaagttactcatatggacgccgtccagtctgaacatcaatctttttagccaga
gatatcatagccgctcttagagtttcagcgtgattttccaacctaaatagaacttcatcgttgcgtttacaacacttttctatt
tgttcaaactttgttgttacattagtaatctttttttccaaattagttagccgttgtttgagagtttcctcattgtcgtcttca
tcggctttaacaattgcttcgcgtttagcctctggctttttagcagccgttgtagaaaaaaattcagttgctggaattgcaaga
tcgtcatctccggggaaaagagttccgtccatttaaagtacagattttagaaactgacactctgcgttatttatatttggtaca
acacatggattataaatattgatgttaataacatcagaaaatgtaaagtctatacattgttgcatcgtgttaaattttctaatg
gatctagtattattgggtccaacttctgcctgaaatccaaatatggaagcggatacaaaaccgtttcctggataaaccacacat
ctccacttttgctttacatcagaaattgtgtcgttgacatcttgaactctcctatctaatgccggtgttccacctatagatttt
gaatattcgaatgctgcatgagtagcattaaattccttaatattgccataattttcatatattgagtaaccctggataaaaagt
aaacacaccgcagccgtagctaccacaataaaaaaaattgatagagagttcatttataatctattagaagctgacaaaattttt
ttacacgcatcagacaatgctttaataaatagttcaacatctacttttgtcatatcgaaccgatggtatgattctaacctagaa
ttacatccgaaaaagttgactatgttcatagtcattaagtcattaacaaacaacattccagactctggattataagacgatact
gtttcgtcacaattacctaccttaatcatgtgattatgaatattggctattagagcaccttctaagaaatctataatatctttg
aaacacgatttaaaatcaaaccacgaatatacttctacgaagaaagttagtttacccataggagaaataactataaatggagat
ctaaatacaaaatccggatctatgatagttttaacattattatattctctattaaatacctccacatctaaaaatgttaatttt
gaaactatgtcttcgtttattaccgtacctgaactaaacgctataagctctattgtttgagaactctttaaacgatattcttga
aatacatgtaacaaagtttcctttaactcggtcggtttatctaccatagttacagaatttgtatccttatctataatataataa
tcaaaatcgtataaagttatataattatcgcgttcagattgggatcttttcaaatagactaaaaaccccatttctctagtaagt
atcttatgtatatgtttgtaaaatatcttcatggtgggaatatgctctaccgcagttagccattcctcattgacagcggtagat
gtattagacaaaactattccaatgtttaacaagggccattttacgagattattaaatccttgtttgataaatgtagccaatgag
ggttcgagttcaacgacgattgaattctcttcccgcggatgctgcatgatgaacgacgggatgttgttcgattgatttggaatt
ctttttcgactttttgtttatattaaatattttaaaatttatagcggatagcaattcatgtaccacggataatgtagacgcgta
ttgcgcatcgatatctttattattagataaatttatcaataaatgtgagaagtttgcctcgttaaggtcttccatttaaatatt
atataaacatttgtgtttgtatcttattcgtcttttatggaatagttttttactagtaaagctgcaattacacactttgtccgt
aaaacataaatataaacaccagcttttatcaatcgttccaaaaagtcgacggcggacatttttaacatggcatctattttaaat
acacttaggtttttggaaaaaacatcattttataattgtaacgattcaataactaaagaaaagattaagattaaacataaggga
atgtcatttgtattttataagccaaagcattctaccgttgttaaatacttgtctggaggaggtatatatcatgatgatttggtt
gtattggggaaggtaacaattaatgatctaaagatgatgctattttacatggatttatcatatcatggagtgacaagtagtgga
acaatttacaaattgggatcgtctatcgatagactttctctaaataggactattgttacaaaagttaataattataattatgat
acattttttgacgatgatgattgatcgctattgcacaattttgtttttttactttctaatatagcgtttagattctttttcatg
tgcgaatattgatttactaaaatatctatgtttaacttttgttctataacgtccttatcggcggtatcggtacatatacgtaat
tcaccttcacaaaatacggagtcttcgataataatagccaatcgattattggatctagctgtctgtatcatattcaacatgttt
aatatatcctttcgtttcccctttacaggcatcgatcgtagcatattttccgcgtctgagatggaaatgttaaaactacaaaaa
tgcgtaatgttagcccgtcctaatattggtacgtgtctataagtttggcatagtagaataatagacgtgtttaaatgccttcca
aagtttaagaattctattagagtattgcattttgatagtttatcgcctacatcatcaaaaataagtaaaaagtgtgctgatttt
ttatgattttgtgcgacagcaatacatttttctatgttacttttagttcgtatcagattatattctagagattcctgactacta
acgaaattaatatgatttggccaaatgtatccatcataatctggattataaacgggtgtaaacaagaatacatgtttatatttt
ttaactagtgtagaaaacagagatagtaaatagatagtttttccagatccagatcctcccgttaaaaccattctaaacggcatt
tttaataaattttctcttgaaaattgtttttcttggaaacaattcataattatatttacagttactaaattaatttgataataa
atcaaaatatggaaaactaaggtcgttagtagggaggagaacaaagaaggcacatcgtgacataaataacatttattatcatga
tgacaccagaaaacgacgaagagcagacatctgtgttctccgctactgtttacagagacaaaattcagggaaagaataaacgca
aacgcgtgattggtctatgtattagaatatctatggttatttcactactatctatgattaccatgtccgcgtttctcatagtgc
gcctaaatcaatgcatgtctgctaacgaggctgctattactgacgccgctgttgccgttgctgctgcatcatctactcatagaa
aggttgcgtctagcactacgcaatatgatcacaaagaaagctgtaatggtttatattaccagggttcttgttatatattacatt
cagactaccagttattctcggatgctaaagcaaattgcactgcggaatcatcaacactacccaataaatccgatgtcttgacta
cctggctcattgattatgttaaggatacatggggatctgatggtaatccaattacaaaaactacatccgattatcaagattctg
atgtatcacaagaagttagaaagtatttttgtgttaaaacaatgaactaatatttatttttgtacattaataaatgaaatcgct
taatagacaaactgtaagtaggtttaagaagttgtcggtgccggtcgctataatgatgatactctcaaccattattagtggcat
aggaacatttctgcattacaaagaagaactgatgcctagtgcttgcgccaatggatggatacaatacgataaacattgttattt
agatactaacattaaaatgtctacagataatgcggtttatcagtgtcgtaaattacgagccagattgcctagaccggatactag
acatctgagagtattgtttagtattttttataaagattattgggtaagtttaaaaaagaccaatgataaatggttagatattaa
taatgataaagatatagatattagtaaattaacaaattttaaacaactaaacagtacgacggatgctgaagcgtgttatatata
caagtctggaaaactggttaaaacagtatgtaaaagtactcaatctgtactatgtgttaaaaaattctacaagtgacaacaaaa
aatgaattaataataagtcgttaacgtacgccgccatggacgccgcgtttgttattactccaatgggtgtgttgactataacag
atacattgtatgatgatctcgatatctcaatcatggactttataggaccatacattataggtaacataaaaactgtccaaatag
atgtacgggatataaaatattccgacatgcaaaaatgctactttagctataagggtaaaatagttcctcaggattctaatgatt
tggctagattcaacatttatagcatttgtgccgcatacagatcaaaaaataccatcatcatagcatgcgactatgatatcatgt
tagatatagaagataaacatcagccattttatctattcccatctattgatgtttttaacgctacaatcatagaagcgtataacc
tgtatacagctggagattatcatctaatcatcaatccttcagataatctgaaaatgaaattgtcgtttaattcttcattctgca
tatcagacggcaatggatggatcataattgatgggaaatgcaatagtaattttttatcataaaagttgtaaagtaaataataaa
acaataaatattgaactagtagtacgtatattgagcaatcagaaatgatgctggtacctcttatcacggtgaccgtagttgcgg
gaacaatattagtatgttatatattatatatttgtaggaaaaagatacgtactgtctataatgacaataaaattatcatgacaa
aattaaaaaagataaagagttctaattccagcaaatctagtaaatcaactgatagcgaatcagactgggaggatcactgtagtg
ctatggaacaaaacaatgacgtagataatatttctaggaatgagatattggacgatgatagcttcgctggtagtttaatatggg
ataacgaatccaatgttatggcgcctagcacagaacacatttacgatagtgttgctggaagcacgctgctaataaataatgatc
gtaatgaacagactatttatcagaacactacagtagtacttaatgaagataccaaacagaatcctaactattcatccaatcctt
tcgtaaattataataaaaccagtatttgtagcaagtcaaatccgttcattacagaactcaacaataaatttagtgagaataatc
cgtttagacgagcacatagcgatgattatcttaataagcaagaacaagatcatgaacacgatgatatagaatcattggtgtgat
tagtttcctttttataaaattgaagtaatatttagtattattgctgccgtcacgttgtacaaatggagatattccctgtattcg
gcatttctaaaattagcaattttattgctaataatgactgtagatattatatagatacagaacatcaaaaaattatatctgatg
agatcaatagacagatggatgaaacggtacttcttaccaacatcttaagcgtagaagttgtaaatgacaatgagatgtaccatc
ttattcctcatagattatcgacgattatactctgtattagttctgtcggaggatgtgttatctctatagataatgacgtcaatg
gcaaaaatattctaacctttcccattgatcatgctgtaatcatatccccactgagtaaatgtgtcgtagttagcaagggtccta
caaccatattggttgttaaagcggatatacctagcaaacgattggtaacatcgtttacaaacgacatactgtatgtaaacaatc
tatcactgattaattattcgccgttgtctgtattcattattagacgagttaccgactatttggatagacacatatgcgatcaga
tatttgcgaataataagtggtattccattataaccatcgacaataagcagtttcctattccatcaaactgtataggtatgtcct
ctgccaagtacataaattctagcatcgagcaagatactttaatacatgtttgtaacctcgagcatccattcgacttagtataca
aaaaaatgcagtcgtacaattctgtacctatcaaggaacaaatattgtacggtagaattgataatataaatatgagcattagta
tttctgtggattaatagatttctagtatggggatcattaatcatctctaatctctaaatacctcataaaacgaaaaaaaagcta
ttatcaaatactgtacggaatggattcattctcttctctttttatgaaactctgttgtatatctactgataaaactggaagcaa
aaaatctgataaaaagaataagaataagatcaaggattattataaaataacaatagttcctggttcctcttccacgtctactag
ctcgtggtattatacacatgcctagtaatagtctctttgcgttgacggaaagcagactagaaataacaggctaaaatgttcaga
caccataatagttcccaacccagataataacagagtaccatcaacacattcctttaaactcaatcccaaacccaaaaccgttaa
aatgtatccggccaattgatagtagataatgaggtgtacagcgcatgatgatttacacagtaaccaaaatgaaaatactttagt
aattataagaaatatagatggtaacgtcatcatcaacaatccaataatatgccggagagtaaacattgacggataaaacaaaaa
tgctccgcataactctatcatggcaataacacaaccaaatacttgtaagattcctaaattagtagaaaatacaacggatatcga
tgtataagtgatctcgagaaataataagaataaagtaatgcccgtaaagataaacatcaacattgtttggtaatcattaaacca
attagtatgaagttgaactaatttcacagtagattttattccagtattatccccgcatgtataagtacctggtaagatatcttt
atattccataatcaatgagacatcactatctgataacgaatgaagtctagcactagtatgccatttacttaatattgtcgtctt
ggaagttttattataagttaaaatatcatggttatccaatttccatctaatatactttgtcggattatctatagtacacggaat
aatgatggtatcattacatgctgtatactctatggtctttgtagttgttataacaaccaacgtatagaggtatatcaacgatat
tctaactcttgacattttttatttatttaaaatgatacctttgttatttattttattctattttgctaacggtattgaatggca
taagtttgaaacgagtgaagaaataatttctacttacttattagacgacgtattatacacgggtgttaatggggcggtatacac
attttcaaataataaactaaacaaaactggtttaactaataataattatataacaacatctataaaagtagaggatgcggaacc
aataacggaaatcccaaatgttggaaaatagacggttcagacgacccaaaacatagaggtagaggatacgctccttatcaaaat
agcaaagtaacgataatcagtcacaacggatgtgtactatctgacataaacatatcaaaagaaggaattaaacgatggagaaga
tttgacggaccatgtggttatgatttatacacggcggataacgtaattccaaaagatggtttacgaggagcattcgtcgataaa
gatggtacttatgacaaagtttacattcttttcactgatactatcggctcaaagagaattgtcaaaattccgtatatagcacaa
atgtgcctaaacgacgaaggtggtccatcatcattgtctagtcatagatggtcgacgtttctcaaagtcgaattagaatgtgat
atcgacggaagaagttatagacaaattattcattctagaactataaaaacagataatgatacgatactatatgtattcttcgat
agtccttattccaagtccgcattatgtacctattctatgaataccattaaacaatctttttctacgtcaaaattggaaggatat
acaaagcaattgccgtctccagctcctggtatatgtttaccagctggaaaagttgttccacataccacgtttgaagtcatagaa
aaatataatgtactagatgatattataaagcctttatctaaccaacctatcttcgaaggaccgtctggtgttaaatggttcgat
ataaaggagaaggaaaatgaacatcgggaatatagaatatacttcataaaagaaaattctatatattcgttcgatacaaaatct
aaacaaactcgtagctcgcaagtcgatgcgcgactattttcagtaatggtaacttcgaaaccgttatttatagcagatataggg
ataggagtaggaatgccacaaatgaaaaaaatacttaaaatgtaatcttaatcgagtacaccgcacgacaatgaacaaacataa
gacagattatgctggttatgcttgctgcgtaatatgcggtctaattgttggaattatttttacagcgacactattaaaagttgt
agaacgtaaattagttcatacaccatcaatagataaaacgataaaagatgcatatattagagaagattgtcctactgactggat
aagctataataataaatgtatccatttatctactgatcgaaaaacctgggaggaaggacgtaatgcatgcaaagctctaaatcc
aaattcggatctaattaagatagagactccaaacgagttaagttttttaagaagcattagacgcggatattgggtaggagaatc
cgaaatattaaaccagacaaccccatataattttatagctaaaaatgccacgaagaatggaactaaaaaacggaaatatatttg
tagtacaacgaatactcccaaactacatttttatcataccactacttcggttagatgttttagaaaaaaataaatatcgccgta
ccgttcttgtttttataaaaataacaattaacaattatcaaattttttctttaatattttacgtggttgaccattcttggtggt
aaaataatctcttagtgttggaatggaatgctgtttaatgtttccgcactcatcgtatattttgacgtatgcagtcacatcgtt
tacgcaatagtcagactgtagttctatcatgcttcctacatcagaaggaggaacagttttaaagtctcttggttttaatctatt
gccattagttttcatgaaatcctttgttttatccacttcacattttaaataaatgtccactatacattcttctgttaattttac
tagatcgtcatgggtcatagaatttataggttccgtagtccatggatccaaactagcaaacttcgcgtatacggtatcgcgatt
agtgtatacaccaactgtatgaaaattaagaaaacagtttaataaatcaacagaaatatttaatcctccgtttgatacagatgc
gccatatttatggatttcggattcacacgttgtttgtctgaggtgttcgtctagtgttgcttctacgtaaacttcgattcccat
atattctttattgtcagaatcgcataccgatttatcatcatacactgtttgaaaactaaatggtatacacatcaaaataataaa
taataacgagtacattctgcaatattgttatcgtaattggaaaaatagtgttcgagtgagttggattatgtgagtattggattg
tatattttattttatattttatattttgtagtaagaatagaatgctaatgtcaagtttattccaatagatgtcttattaaaaaa
catatataataaataacaatggctgaatggcataaaattatcgaggatatctcaaaaaataataagttcgaggatgccgccatc
gttgattacaagactacaaagaatgttctagctgctattcctaacagaacatttgccaagattaatcctctcatcactaatcgt
aatattctaaaacctcttattggtcagaaatattgtattgtatatactaactctctaatggatgagaacacgtatgctatggag
ttgcttactgggtacgcccctgtatctccgatcgttatagcgagaactcataccgcacttatatttttgatgggtaagccaaca
acatccagacgtgacgtgtatagaacgtgtagagatcacgctacccgtgtacgtgcaactggtaattaaaataaaaagtaatat
tcatatgtagtgtcaattttaaatgatgatgatgaaatggataatatccatattgacgatgtcaataatgccggtattggcata
cagttcatcgatttttagatttcattcagaggatgtggaattatgttatgggcatttgtattttgataggatctataatgtagt
aaatataaaatataatccgcatattccatatagatataattttattaatcgcacgttaaccgtagatgaactagacgataatgt
cttttttacacatggttattttttaaaacacaaatatggttcacttaatcctagtttgattgtctcattatcaggaaacttaaa
atataatgatatacaatgctcagtaaatgtatcgtgtctcattaaaaatttggcaacgagtacatctactatattaacatctaa
acataagacttattctctacatcggtccacgtgtattactataataggatacgattctattatatggtataaagatataaatga
catctatgattttactgcaatatgtatgctaatagcgtctacattgatagtgaccatatacgtgtttaaaaaaataaaaatgaa
ctcttaattatgctatgctattagaaatggataaaatcaaaattacggttgattcaaaaattggtaatgttgttaccatatcgt
ataacttggaaaagataactattgatgtcacacctaaaaagaaaaaagaaaaggatgtattattagcgcaatcagttgctgtcg
aagaggcaaaagatgtcaaggtagaagaaaaaaatattatcgatattgaagatgacgatgatatggatgtagaaagcgcataat
acgatctataaaaataagtatataaatactttttatttactgtactcttactgtgtagtggtgataccctactcgattattttt
ttaaaaaaaaatacttattctgattcttctagccatttccgtgttcgttcgaatgccacatcgacgttaaagataggggagtag
ttgaaatctagttctgcattgttggtacgcacctcaaatgtagtgttggatatcttcaacgtatagttgttgagtagtgatggt
tttctaaatagaattctcttcatatcattcttgcacgcgtacatttttagcatccatcttggaatcctagatccttgttctatt
cccaatggtttcatcaatagaagattaaacatatcgtacgaacacgatggagagtaatcgtagcaaaagtaagcatttccttta
atctcagatcccggatactggatatattttgcagccaacacgtgcatccatgcagcatttcctacatatacccggctatgtacc
gcgttatcatcgactgtacgatacataatgttaccgtgttgcttacattgctcgtaaaagactttcatcaatttgtctccttct
ccgtaaattccagtgggtcttaggcaacaagtatacaattttgctccattcatgattacggaattattggctttcataaccagt
tgctcggccatacgtttactttttgcgtatacatgtcctggtgatatatcataaagggtatgctcatggccgatgaatggatca
ccgtgtttattgggtcctattgcttccatgctactagtatagatcaaatacttgattcctaggtccacacaagctgccaatata
gtctgtgttccataatagtttactttcatgatttcattatcggtgtattttccaaatacatccactagagcagctgtatgaata
atcagatttaccccatctagcgcttctcttaccttatcaaagtcgtttatatcacattgtatatagtttataaccttaactttc
gaggttattggttgtggatcttctacaatatctatgactctgatttcttgaacatcatctgcactaattaacagttttactata
tacctgcctagaaatccggcaccaccagtaaccgcgtacacggccattgctgccactcataatatcagactacttattctattt
tactaaataatggctgtttgtataatagaccacgataatatcagaggagttatttactttgaaccagtccatggaaaagataaa
gttattggattaaaatccggaacgtatagtttgataattcatcgttacggagatattagtcaaggatgtgattccataggcagt
ccagaaatatttatcggtaacatctttgtaaacagatatggtgtagcatatgtttatttagatacagatgtaaatatatctaca
attattggaaaggcgttatctatttcaaaaaatgatcagagattagcgtgtggagttattggtatttcttacataaatgaaaag
ataatacattttcttacaattaacgagaatggcgtttgatatatcagttaatgcgtctaaaacaataaatgcattagtttactt
ttctactcagcaaaataaattagtcatacgtaatgaagttaatgatacacactacactgtcgaatttgatagggacaaagtagt
tgacacgtttatttcatataatagacataatgactccatagagataagaggggtgcttccagaggaaactaatattggttgcgc
ggttaatacgccggttagtatgacttacttgtataataagtatagttttaaactgattttagcagaatatataagacacagaaa
tactatatccggcaatatttattcggcattgatgacactagatgatttggctattaaacagtatggagacattgatctattatt
taatgagaaacttaaagtagactccgattcgggactatttgactttgtcaactttgtaaaggatatgatatgttgtgattctag
aatagtagtagctctatctagtctagtatctaaacattgggaattgacaaataaaaaatataggtgtatggcattagccgaaca
tatatctgatagtattccaatatctgagctatctagactacgatacaatctatgtaagtatctacgcgggcacactgagagcat
agaggatgaatttgattattttgaagacgatgattcgtctacatgttctgccgtaaccgacagggaaacggatgtataattttt
tttatagcgtgaaggatatgataaaaaatataattgttgtatttatcccattccaatcaccttatatgattctgtaacacaatg
aaggagtcttatagatgtatagaggtcagatactggtttgataaactgtttattccacataagtatgtttgactttatggttag
acccgcatactttaacaaatcactgaaaattggagttaggtattgacctctcagaatcagttgccgttctggaacattaaatgt
attttttatgatatactccaacgcatttatgtgggcatacaacaagtcattactaatggagtattccaagagaagagatttcaa
cagactgtttatgaactcgaatgccgcctcattgtcgcttatattgatgatgtcgaattctcccaatatcatcaccgatgagta
gctcatcttgttatcgggatccaagttttctaaagatgtcattaaaccctcgatcatgaatggatttatcatcatcgtttttat
gttggacatgagcttagtccgtttgtccacatctatagacgacgatttctgaattatttcatatatccctctctttaactccag
gaacttgtcaggatggtctactttaatatgttctcgtctaagagatgaaaatctttggatggttgcacgcgacttttctctaaa
ggatcctctcttaaatgaatccatcttatccttggacaagatggacagtctattttccttagatggtttaatatttttgttacc
catgatctataaaggtagacctaatcgtctcggatgaccatatatttattttcagttttattatacgcataaattgtaaaaaat
atgttaggtttacaaaaatgtctcgtggggcattaatcgtttttgaaggattggacaaatctggaaaaacaacacaatgtatga
acatcatggaatctataccggcaaacacgataaaatatcttaactttcctcagagatccactgtcactggaaagatgatagatg
actatctaactcgtaaaaaaacctataatgatcatatagttaatctattattttgtgcaaatagatgggagtttgcatctttta
tacaagaacaactagaacagggaattactttaatagttgatagatacgcattctctggagtagcgtatgccgccgctaaaggcg
cgtcaatgactctcagtaagagttatgaatctggattgcctaaacccgacttagttatattcttggaatctggtagcaaagaaa
ttaatagaaacgtcggcgaggaaatttatgaagatgttacattccaacaaaaggtattacaagaatataaaaaaatgattgaag
aaggagatattcattggcaaattatttcttctgaattcgaggaagatgtaaagaaggagttgattaagaatatagttatagagg
ctatacacacggttactggaccagtggggcaactgtggatgtaatagtgaaattacattttttataaatggatgaagcatatta
ctctggcaacttggaatcagtactcggatacgtgtccgatatgcataccgaactcgcatcaatatctcaattagttattgccaa
gatagaaactatagataatgatatattaaacaaggacattgtaaattttatcatgtgtagatcaaacttggataatccatttat
ctctttcctagatactgtatatactattatagatcaagagatctatcagaccgaattgattaattcattagacgacaatgaaat
tatcgattgtatagttaacaagtttatgagcttttataaggataacctagaaaatatagtagatgctatcattactctaaaata
tataatgaataatccagattttaaaactacgtatgccgaagtactcggttccagaatagcggatatagatattaaacaagtgat
acgtgagaatatactacaattgtctaataatatccgcgaacgatatttgtgaaaatattaaaaaaaaatactttttttattaaa
tgacgtcgcttcgcgaatttagaaaattatgctgtgatatatatcacgcatcaggatataaagaaaaatctaaattaattagag
actttataacagatagggatgataaatatttgatcattaagctattgcttcccggattagacgatagaatttataacatgaacg
ataaacaaattataaaattatatagtataatatttaaacaatctcaggaagatatgctacaagatttaggatacggatatatag
gagacactattaggactttcttcaaagagaacacagaaatccgtccacgagataaaagcattttaactttagaagaagtggata
gttttttaactacgttatcatccgtaactaaagaatcgcatcaaataaaattattgactgatatcgcatccgtttgtacatgta
atgatttaaaatgtgtagtcatgcttattgataaagatctaaaaattaaagcgggccctcggtacgtacttaacgctattagtc
ctcatgcctatgatgtgtttagaaaatctaataacttgaaagagataatagaaaatgcatctaaacaaaatctagactctatat
ctatttctgttatgactccaattaatcccatgttagcggaatcgtgtgattctgtcaataaggcgtttaaaaaatttccatcag
gaatgtttgcggaagtcaaatacgatggtgaaagagtacaagttcataaaaataataacgagtttgccttctttagtagaaaca
tgaaaccagtactctctcataaagtggattatctcaaagaatacataccgaaagcatttaaaaaagctacgtctatcgtattgg
attctgaaattgttcttgtagacgaacataatgtaccgctcccgtttggaagtttaggtatacacaaaaagaaagaatataaaa
actctaacatgtgtttgttcgtgtttgactgtttgtactttgatggattcgatatgacggacattccattgtacgaacgaagat
cttttctcaaagatgttatggttgaaatacccaatagaatagtattctcagagttgacgaatattagtaacgagtctcagttaa
ctgacgtattggatgatgcactaacgagaaaattagaaggattggtcttaaaagatattaatggagtatacgaaccgggaaaga
gaagatggttaaaaataaagcgagactatttgaacgagggttccatggcagattctgccgatttagtagtactaggtgcttact
atggtaaaggagcaaagggtggtatcatggcagtctttctaatgggttgttacgacgatgaatccggtaaatggaagacggtta
ccaagtgttcaggacacgatgataatacgttaagggagttgcaagaccaattaaagatgattaaaattaacaaggatcccaaaa
aaattccagagtggttagtagttaataaaatctatattcccgattttgtagtagaggatccaaaacaatctcagatatgggaaa
tttcaggagcagagtttacatcttccaagtcccataccgcaaatggaatatccattagatttcctagatttactaggataagag
aggataaaacgtggaaagaatctactcatctaaacgatttagtaaacttgactaaatcttaatagttacatacaaattaaaata
acactatttagttggtggtcgccatggatggtgttattgtatactgtctaaacgcgttagtaaaacatggcgaggaaataaatc
atataaaaaatgatttcatgattaaaccatgttgtgaaaaagtcaagaacgttcacattggcggacaatctaaaaacaatacag
tgattgcagatttgccatatatggataatgcggtatccgatgtatgcaattcactgtataaaaagaatgtatcaagaatatcca
gatttgctaatttgataaagatagatgacgatgacaagactcctactggtgtatataattattttaaacctaaagatgccattc
ctgttattatatccataggaaaggatagagatgtttgtgaactattaatctcatctgataaagcgtgtgcgtgtatagagttaa
attcatataaagtagccattcttcccatggatgtttccttttttaccaaaggaaatgcatcattgattattctcctgtttgatt
tctctatcgatgcggcacctctcttaagaagtgtaaccgataataatgttattatatctagacaccagcgtctacatgacgagc
ttccgagttccaattggttcaagttttacataagtataaagtccgactattgttctatattatatatggttgttgatggatctg
tgatgcatgcaatagctgataatagaacttacgcaaatattagcaaaaatatattagacaatactacaattaacgatgagtgta
gatgctgttattttgaaccacagattaggattcttgatagagatgagatgctcaatggatcatcgtgtgatatgaacagacatt
gtattatgatgaatttacctgatgtaggcgaatttggatctagtatgttggggaaatatgaacctgacatgattaagattgctc
tttcggtggctggtatttggaaagttttataggtagttgatagaacaaaatacataattttgtaaaaataaatcactttttata
ctaatatgacacgattaccaatacttttgttactaatatcattagtatacgctacaccttttcctcagacatctaaaaaaatag
gtgatgatgcaactttatcatgtaatcgaaataatacaaatgactacgttgttatgagtgcttggtataaggagcccaattcca
ttattcttttagctgctaaaagcgacgtcttgtattttgataattataccaaggataaaatatcttacgactctccatacgatg
atctagttacaactatcacaattaaatcattgactgctagagatgccggtacttatgtatgtgcattctttatgacatcgccta
caaatgacactgataaagtagattatgaagaatactccacagagttgattgtaaatacagatagtgaatcgactatagacataa
tactatctggatctacacattcaccggaaactagttctgagaaacctgattatatagataattctaattgctcgtcggtattcg
aaatcgcgactccggaaccaattactgataatgtagaagatcatacagacaccgtcacatacactagtgatagcattaatacag
taagtgcatcatctggagaatccacaacagacgagactccggaaccaattactgataaagaagaagatcatacagttacagaca
ctgtctcatacactacagtaagtacatcatctggaattgtcactactaaatcaaccaccgatgatgcggatctttatgatacgt
acaatgataatgatacagtaccatcaactactgtaggcggtagtacaacctctattagcaattataaaaccaaggactttgtag
aaatatttggtattaccgcattaattatattgtcggccgtggcaatattctgtattacatattatatatataataaacgttcac
gtaaatacaaaacagagaacaaagtctagatttttgacttacataaatgtctgggatagtaaaatctatcatattgagcgggcc
atctggtttaggaaagacagccatagccaaaagactatgggaatatatttggatttgtggtgtcccataccactagatttcctc
gtcctatggaacgagaaggtgtcgattaccattacgttaacagagaggccatctggaagggaatagccgccggaacatactgag
tttttaggaaatatttacggaacttctaaaactgctgtgaatacagcggctattaataatcgtatttgtgtgatggatctaaac
atcgacggtgttagaagttttaaaaatacttacctaatgccttactcggtgtatataagacctacctctcttaaaatggttgag
accaagcttcgttgtagaaacactgaagcggatgatgagattcatcgtcgtgtgatgttggcaaaaactgacatggatgaggca
ggtgaagccggtctattcgacactattatcattgaagatgatgtgaatttagcatatagtaagttaattcagatactacaggac
cgtattagaatgtattttaacactaattagagacttaagacttaaaacttgataattaataatataactcgtttttatatgtgg
ctatttcaacgtctaatgtattagttaaatattaaaacttaccacgtaaaacttaaaatttaaaatgatatttcattgacagat
agatcacacattatgaactttcaaggacttgtgttaactgacaattgcaaaaatcaatgggtcgttggaccattaataggaaaa
ggtggatttggtagtatttatactactaatgacaataattatgtagtaaaaatagagcccaaagctaacggatcattatttacc
gaacaggcattttatactagagtacttaaaccatccgttatcgaagaatggaaaaaatctcacaatataaagcacgtaggtctt
atcacgtgcaaggcatttggtctatacaaatccattaatgtggaatatcgattcttggtaattaatagattaggtgcagatcta
gatgcggtgatcagagccaataataatagattaccaaaaaggtcggtgatgttgatcggaatcgaaatcttaaataccatacaa
tttatgcacgagcaaggatattctcacggagatattaaagcgagtaatatagtcttggatcaaatagataagaataaattatat
ctagtggattacggattggtttctaaattcatgtctaatggcgaacatgttccatttataagaaatccaaataaaatggataac
ggtactctagaatttacacctatagattcgcataaaggatacgttgtatctagacgtggagatctagaaacacttggatattgt
atgattagatggttgggaggtatcttgccatggactaagatatctgaaacaaagaattgtgcattagtaagtgccacaaaacag
aaatatgttaacaatactgcgactttgttaatgaccagtttgcaatatgcacctagagaattgctgcaatatattaccatggta
aactctttgacatattttgaggaacccaattacgacaagtttcggcacatattaatgcagggtgtatattattaagtgtggtgt
ttggttgatgtaaaatttttgtcgataaaaattaaaaaataacttaatttattattgatctcgtgtgtacaaccgaaatcatgg
cgatgttttacgcacacgctctcggtgggtacgacgagaatcttcatgcctttcctggaatatcatcgactgttgccaatgatg
tcagtttataataacaagtatgacattgtaaaagacaaatatatgtggtgttacagtcaggtgaacaagagatatattggagca
ctgctgcctatgtttgagtgcaatgaatatctacaaattggagatccgatccatgatcaagaaggaaatcacatatcgccacaa
aaactactatgctctaagcggaatcgggtacgagagtctagacttgtgtttggaaggagtagggattcatcatcacgtacttga
aacagaaaacgctgtatatggaaaagttcaacatgattattctactatcaaagagaaggccaaagaaatgaatgcactcagttc
aggacctatcatcgattaccacgtctggataggagattgtatctgtcaagttactgctgtggacgtacatggaaaggaaattat
gagaatgagattcaaaaagggtgcggtgcttccgatcccaaatctggtaaaagttaaacttggggagaatgatacagaaaatct
ttcttctactatatcggcggcaccatcgaggtaaccacctctctggaagacagtgtgaatcatgtactcatgaaacgtttggaa
tctatacgccatatgtggtctgttgtatatgatcattttgatattgtgaatggtaaagaatgctgttatgtgcatacgcatttg
tctaatcaaaatcttataccgagtactgtaaaaacaaatttgtacatgaagactatgggatcatgcattcaaatgagtatctta
gcgaactgaaggaatcaggtggatggagtcccagaccagaaatgcaggaatttgaatatccagatggagtggaagacactgaat
caattgagagattggtagaggagttcttcaatagatcagaacttcaggctggtaaatctattaatgttaaacatacatctgttt
cagctaagcaactaagaacacgtatactctcatcttttgccaacacagagggtggatatttgttcattggagttgataataata
cacacaaagtatttggattcacggtgggttacgactacctcagactgatagagaatgatatagaaaagcatatcaaaagacttt
gtgttgtgtatttctgtgagaagaaagaggacatcaagtacacgtgtcgattcatcaaggtatataaacctggggatgaggcta
cctcgacatacgtgtgcgctatcaaagtggaaagatgctgttgtgctgtgtttgcagattggccagaatcatggtatcaagaag
tattctccagatgaataggtgtcacatataaaattttaattaatgtaactatagagaacaaataataggttgtaatatcatata
gacaataactaacaattaattagtaactgttatctctttttaactaactaactatacctattaatacatcgtaattatagttct
taacatctattaatcattgattcgcttctttaattttttataaaccaacattgttaattgaaaagggataacatgttacagaat
ataaattatatatggattttttttaaaaaggaaatacttgactggagtgtatatttatctcttcattatatagcacgcgtgttt
tccaatttttccacatcccatataatacaggattataatctcgttcgaacatacgagaaagtggataaaacaatagttgatttt
ttatctaggttgccaaatttattccatattttagaatatggggaaaatattctacatatttattctatggatgatgctaatacg
aatattataattttttttctagatagagtattaaatattaataagaacgggtcatttatacacaatctcaggttatcatcatcc
attaatataaaagaatatgtatatcaattagttaataatgatcatccagataataggataagactaatgcttgaaaatggacgt
agaacaagacattttttgtcctatatatcagatacagttaatatctatatatgtattttatatagatgccgaagacagttacgg
ttgtacattattacatagatgtatatatcactataagaaatcagaatcagaatcagaatcatacaatgaattaattaagatatt
gttaaataatggatcagatgtagataaaaaagatacgtacggaaacacaccttttatcctattatgtaaacacgatatcaacaa
cgtggaattgtttgagatatgtttagagaatgctaatatagactctgtagactttaatagatatacacctcttcattatgtctc
atgtcgtaataaatatgattttgtaaagttattaatttctaaaggagcaaatgttaatgcgcgtaataaattcggaactactcc
attttattgtggaattatacacggtatctcgcttataaaactatatttggaatcagacacagagttagaaatagataatgaaca
tatagttcgtcatttaataatttttgatgctgttgaatctttagattatctattatccagaggagttattgatattaactatcg
tactatttacgacgctgtcagttataatgcgtataatacgttggtctatctattaaacagaaatggtgattttgagacgattac
tactagtggatgtacatgtatttcggaagcagtcgcaaacaacaacaaaataataatggaagtactattgtctaaacgaccatc
tttgaaaattatgatacagtctatgatagcaattactaaacataaacagcataatgcagatttattgaaaatgtgtataaaata
tactgcgtgtatgaccgattatgatactcttatagatgtacaatcactacagcaatataaatggtatattttaagatgtttcga
tgaaatagatatcatgaagagatgttatataaaaaataaaactgtattccaattagttttttgtatcaaagacattaatacttt
aatgagatacggtaaacatccttctttcgtgaagtgcactagtctcgacgtatacggaagtcgtgtacgtaatatcatagcatc
tattagatatcgtcagagattaattagtctattatccaagaagctggatcctggagataaatggtcgtgttttcctaacgaaat
aaaatataacgataacgaactgtccacatatctaaaaatcttataaacactattaaaatataaaatcacactacatcattgttt
ccttttagtgctcgacagtgtatactatttttaacgctcataaataaaaatgaaaacgatttccgttgttacgttgttatgcgt
actacctgctgttgtttattcaacatgtactgtacccactatgaataacgctaaattaacgtctaccgaaacatcgtttaataa
taaccagaaagttacgtttacatgtgatcagggatatcattcttcggatccaaatgctgtctgcgaaacagataaatggaaata
cgaaaatccatgcaaaaaaatgtgcacagtttctgattacatctctgaactatataataaaccgctatacgaagtgaattccac
catgacactaagttgcaacggcgaaacaaaatattttcgttgcgaagaaaaaaatggaaatacttcttggaatgatactgttac
gtgtcctaatgcggaatgtcaacctcttcaattagaacacggatcgtgtcaaccagttaaagaaaaatactcatttggggaata
tataactatcaactgtgatgttggatatgaggttattggtgcttcgtacataagttgtacagctaattcttggaatgttattcc
atcatgtcaacaaaaatgtgatataccgtctctatctaatggattaatttccggatctacattttctatcggtggcgttataca
tcttagttgtaaaagtggttttatactaacgggatctccatcatccacatgtatcgacggtaaatggaatcccatactcccaac
atgtgtacgatctaacgaaaaatttgatccagtggatgatggtcccgacgatgagacagatttgagcaaactctcgaaagacgt
tgtacaatatgaacaagaaatagaatcgttagaagcaacttatcatataatcatagtggcgttaacaattatgggcgtcatatt
tttaatctccgttatagtattagtttgttcctgtgacaaaaataatgaccaatataagttccataaattgctaccgtgaatata
aatccgttaaaataatgaataattaataattaataatttaataacaaacaagtatcaaaagattaaagacttatagctagaatc
aattgagatgtcttcttcagtggatgttgatatctacgatgccgttagagcatttttactcaggcactattataacaagagatt
tattgtgtatggaagaagtaacgccatattacataatatatacaggctatttacaagatgcgccgttataccgttcgatgatat
agtacgtactatgccaaatgaatcacgtgttaaacaatgggtgatggatacacttaatggtataatgatgaatgaacgcgatgt
ttctgtaagcgttggcaccggaatactattcatggaaatgtttttcgattacaataaaaatagtatcaacaatcaactaatgta
tgatataattaatagcgtatctataattctagctaatgagagatatagaagcgcttttaacgacgatggtatatacatccgtag
aaatatgattaacaagttgtacggatacgcatctctaactactattggcacgatcgctggaggtgtttgttattatctgttgat
gcatctagttagtttgtataaataattatttcaatatactagttaaaattttaagattttaaatgtataaaaaactaataacgt
ttttatttgtaataggtgcattagcatcctattcgaataatgagtacactccgtttaataaactgagtgtaaaactctatatag
atggagtagataatatagaaaattcatatactgatgataataatgaattggtgttaaattttaaagagtacacaatttctatta
ttacagagtcatgcgacgtcggatttgattccatagatatagatgttataaacgactataaaattattgatatgtctactattc
aacgcagaggtcacacgtgtagaatatctaccaaattatcatgccattatgataagtacccttatattcacaaatatgatggtg
atgagcgacaatattctattactgcagagggaaaatgctataaaggaataaaatatgaaataagtatgatcaacgatgatactc
tattgagaaaacatactcttaaaattggatctacttatatatttgatcgtcatggacatagtaatacatattattcaaaatatg
atttttaaaaatttaaaatatattatcacttcagtgacagtagtcaaataacaaacaacaccatgagatatattataattctcg
cagttttgttcattaatagtatacacgctaaaataactagttataagtttgaatccgtcaattttgattccaaaattgaatgga
ctggggatggtctatacaatatatcccttaaaaattatggcatcaagacgtggcaaacaatgtatacaaatgtaccagaaggaa
catacgacatatccgcatttccaaagaatgatttcgtatctttctgggttaaatttgaacaaggcgattataaagtggaagagt
attgtacgggaccaccgactgtaacattaactgaatacgacgaccatccgtatgctactagaggtagcaaaaagattcctattt
acaaacgcggtgacatgtgtgatatctacttgttgtatacggctaacttcacattcggagattctaaagaaccagtaccatatg
atatcgatgactacgattgcacgtctacaggttgcagcatagactttgtcacaacagaaaaagtgtgcgtgacagcacagggag
ccacagaagggtttctcgaaaaaattactccatggagttcgaaagtatgtctgacacctaaaaagagtgtatatacatgcgcaa
ttagatccaaagaagatgttcccaatttcaaggacaaaatggccagagttatcaagagaaaatttaactaaatttctcggtagc
acatcaaatgatgttaccacttttcttagcatgcttaacttgactaaatattcataactaatttttattaatgatacaaaaacg
aaataaaactgcatattatacactggttaacgcccttataggctctaaccattttcaagatgaggtccctgattatagtccttc
tgttcccctctatcatctactccatgtctattagacgatgtgagaagactgaagaggaaacatggggattgaaaatagggttgt
gtataattgccaaagatttctatcccgaaagaactgattgcagtgttcatctcccaactgcaagtgaaggcaatggattcaggg
atatacgaaacaccgataaattataaaaaaagcaatgtgtccgctgtttccgttaataatactattttcgtaactggcggatta
ttcataaataactctaatagcacgatcgtggttaacaatatggaaaaacttgacatttataaagacaaacaatggtcgattata
gaaatgcctatggctagggtatatcacggcatcgactcgacatttggaatgttatattttgccggaggtctatccgttaccgaa
caatatggtaatttagagaaaaacaacgagatatcttgttacaatcctagaacgaataagtggtttgatatttcatatactatt
tataagatatccatatcatcattgtgtaaactaaataacgtcttctatgtatttagtaaggacattggatatgtggaaaagtat
gatggtctccccgctataaaggcattatcaacttctccttattgattgaaaatgaaaatataaatagtttttatgtatagcagt
attaccctatagttttattgcttactactaacatggatacagatacagatgttacaaatgtagaagatatcatgaatgaaatag
atagagagaaagaagaaatactaaaaaatgtagaaattgaaaataataaaaacattaacaagaatcatcccaatgaatatatta
gagaagcactcgttattaatacaagtagtaatagtgattccattgataaagaagttatagaatgtatcagtcacgatgtaggaa
tatagatcatatctactaatttttataatcaatacaaaacataaaaaacaactcgttattacatagcaggcatggaatccttca
agtattgttttgataacgatggcaagaaatggattatcggaaatactttatattctggtaattcaatactctataaggtcagaa
aaaatttcactagttcgttctacaattacgtaatgaagatagatcacaaatcacacaagccattgttgtctgaaatacgattct
atatatctgtattggatcctttgactatcgacaactggacacgggaacgtggtataaagtatttggctattccagatctgtatg
gaattggagaaaccgatgattatatgttcttcgttataaagaatttgggaagagtattcgccccaaaggatactgaatcagtct
tcgaagcatgcgtcactatgataaacacgttagagtttatacactctcgaggatttacccatggaaaaatagaaccgaggaata
tactgattagaaataaacgtctttcactaattgactattctagaactaacaaactatacaagagtggaaactcacatatagatt
acaacgaggacatgataacttcaggaaatatcaattatatgtgtgtagacaatcatcttggagcaacagtttcaaaacgaggag
atttagaaatgttgggatattgcatgatagaatggttcggtggcaaacttccatggaaaaacgaaagtagtataaaagtaataa
aacaaaaaaaagaatataaaaaatttatagctactttctttgaggactgttttcctgaaggaaatgaacctctggaattagtta
gatatatagaattagtatacacgttagattattctcaaactcctaattatgacagactacgtagactgtttatacaagattgaa
atattctttttttatagagtgtggtagtgttacggatatctaatattaatattagactatctctatcgcgctacacgaccaata
tcgattactatggatatcttctatgaaaggagagaatgtattcatttctccagcgtcaatctcgtcagtattgacaatactgta
ttatggagctaatggatccactgctgaacagctatcaaaatatgtagaaaaggaggagaacacggataaggttagcgctcagaa
tatctcattcaaatccatgaataaagtatatgggcgatattctgccgtgtttaaagattcctttttgagaaaaattggcgataa
gtttcaaactgttgacttcactgattgtcgcactatagatgcaatcaacaagtgtgtagatatctttactgaggggaaaatcaa
tccactattggatgaacaattgtctcctagcaattagtgccgtatactttaaagcaaaatggttgacgccattcgaaaaggaat
ttaccagtgattatcccttttacgtatcaccaacggaaatggtagacgtaagtatgatgtctatgtacggcgagctatttaatc
acgcatctgtaaaagaatcattcggtaacttttcaatcatagaactgccatatgttggagatactagtatgatggtcattcttc
cagacaagattgatggattagaatccatagaacaaaatctaacagatacaaattttaagaaatggtgtaactctctggaagcta
cgtttatcgatgttcacattcccaagtttaaggtaacaggctcgtataatctggtggatactctagtaaagtcaggactgacag
aggtgttcggttcaactggagattatagcaatatgtgtaatttagatgtgagtgtcgacgctatgatccacaaaacgtatatag
atgtcaatgaagagtatacagaagcagctgcagcaacttgtgcactggtgtcagactgtgcatcaacaattacaaatgagttct
gtgtagatcatccgttcatctatgtgattaggcatgttgatggaaaaatttttttcgttggtagatattgctctccgacaacta
attgttaaccattttttttaaaaaaatagaaaaaacatgtggtattagtgcaggtcgttattcttccaattgcaattggtaaga
tgacggccaactttagtacccacgtcttttcaccacagcactgtggatgtgacagactgaccagtattgatgacgtcaaacaat
gtttgactgaatatatttattggtcgtcctatgcataccgcaacaggcaatgcgctggacaattgtattccacactcctctctt
ttagagatgatgcggaattagtgttcatcgacattcgcgagctggtaaaaaatatgccgtgggatgatgtcaaagattgtgtag
aaatcatccgttgttatataccggatgagcaaaaaaccatcatcggactttgtgcatatgctgctacttactggggaggtgaag
accatcccactagtaacagtctgaacgcattgtttgtgatgcttgagatgctaaattacgtggattataacatcatattccggc
gtatgaattgatgagttgtacatcttgacattttcttctttcttctcttctccctttcccagaaacaaactttttttacccact
ataaaataaaatgagtatactacctgttatatttctttctatatttttttattcttcattcgttcagacttttaacgcgcctga
atgtatcgacaaagggcaatattttgcatcattcatggagttagaaaacgagccagtaatcttaccatgtcctcaaataaatac
gctatcatccggatataatatattagatattttatgggaaaaacgaggagcggataatgatagaattataccgatagataatgg
tagcaatatgctaattctgaacccgacacaatcagactctggtatttatatatgcattaccacgaacgaaacctactgtgacat
gatgtcgttaaatttgacaatcgtgtctgtctcagaatcaaatatagatcttatctcgtatccacaaatagtaaatgagagatc
tactggcgaaatggtatgtcccaatattaatgcatttattgctagtaacgtaaacgcagatattatatggagcgggcatcgacg
ccttagaaataagagacttaaacaacggacacctggaattattaccatagaagatgttagaaaaaatgatgctggttattatac
atgtgttttagaatatatatacggtggcaaaacatataacgtaaccagaattgtaaaattagaggtacgggataaaataatacc
ttctactatgcaattaccagaaggtgttgtaacttcaataggtagtaatttgactattgcgtgtagagtatcgttgagacctcc
cacaacggatgcagacgtcttttggataagtaatggtatgtattacgaagaagatgatggggacggagacggtagaataagtgt
agcaaataaaatctatatgaccgataagagacgtgttattacatcccggttaaacattaatcctgtcaaggaagaagatgctac
aacgtttacgtgtatggcgtttactattcctagcatcagcaaaacagttactgttagtataacgtgaatgtatgttgttacatt
tccatgtcaattgagtttataagaatttttatacattatcttccaacaaacaattgacgaacgtattgctatgattaactccca
cgatactatgcatattattaatcattaacttgcagactatacctagtgctattttgacatactcatgttcttgtgtaattgcgg
tatctatattattaaagtacgtaaatctagctatagttttattatttaattttagataatataccgtctccttatttttaaaaa
ttgccacatcctttattaaatcatgaatgggaatttctatgtcatcgttaatatattgtgaacaacaagagcagatatctatag
gaaagggtggaatgcgatacattgatctatgtagttttaaaacacacgcgaactttgaagaatttatataaatcattccatcga
tacatccttctatgttgacatgtatatatccaggaattcttttattaatgtcaggaaatgtataaactaaaacattgcccgaaa
gcggtgcctctatctgcgttatatccgttcttaacttacaaaatgtaaccaatacctttgcatgacttgttttgttcggcaacg
ttagtttaaacttgacgaatggattaattacaatagcatgatccgcgcatctattaagtttttttactttaacgcccttgtatg
tttttacagagactttatctaaatttctagtgcttgtatgtgttataaatataacgggatatagaactgaatcacctaccttag
atacccaattacattttatcagatccagataataaacaaattttgtcgccctaactaattctatattgttatatattttacaat
tggttatgatatcatgtaataacttggagtctaacgcgcatcgtcgtacgtttatacaattgtgatttagtgtagtatatctac
acatgtatttttccgcactatagtattctggactagtgataaaactatcgttatatctgtcttcaatgaactcatcgagatatt
gctctctgtcatattcatacacctgcataaactttctagacatcttacaatccgtgttattttaggatcatatttacatattta
cgggtatatcaaagatgttagattagttaatgggaatcgtctataataatgaatattaaacaattatatgaggacttttaccac
aaagcatcataaaaatgagtcgtcgtctgatttatgttttaaatatcaaccgcgaatcaactcataaaatacaagagaatgaaa
tatatacatattttagtcattgcaatatagaccatacttctacagaacttgattttgtagttaaaaactatgatctaaacagac
gacaacctgtaactgggtatactgcactacactgctatttgtataataattactttacaaacgatgtactgaagatattattaa
atcatggagtggatgtaacgatgaaaaccagtagcggacgtatgcctgtttatatattgcttactagatgttgtaatatttcac
atgatgtagtgatagatatgatagacaaagataaaaaccacttatcgcatagagactattccaacctactactagagtatataa
aatctcgttacatgttattgaaggaagaggatatcgatgagaacatagtatccactttattagataagggaatcgatcctaact
ttaaacaagacggatatacagcgttacattattattatttgtgtctcgcacacgtttataaaccaggtgagtgtagaaaaccga
taacgataaaaaaggccaagcgaattatttctttgtttatacaacatggagctaatctaaacgcgttagataattgtggtaata
caccattccatttgtatcttagtattgaaatgtgtaataatattcatatgactaaaatgctgttgacttttaatccgaatttca
aaatatgtaataatcatggattaacgcctatactatgttatataacttccgactacatacaacacgatattcttgttatgttaa
tacatcactatgaaacaaatgttggagaaatgccgatagatgagcgtcgtataatcgtattcgagtttatcaaaacatattcta
cacgtccggcagattcgataacttatttgatgaataggtttaaaaatatagatatttatacccgctatgaaggaaagacattat
tacacgtagcatgtgaatataataatacacacgtaatagattatcttatacgtatcaacggagatataaatgcgttaaccgaca
ataacaaacacgctacacaactcattatagataacaaagaaaattccccatataccattaattgtttactgtatatacttagat
atattgtagataagaatgtgataagatcgttggtggatcaacttccatctctacctatcttcgatataaaatcatttgagaaat
tcatatcctactgtatacttttagatgacacattttacaatagacacgttaggaatcgcaattctaaaacgtatcgatacgcat
tttcaaaatacatgtcgtttgataaatacgatggtataataactaaatgtcataaagaaacaatattgctcaaactatccactg
ttctagacactacactatatgcagttttaagatgccataattcgaaaaagttaagaagatacctcaacgagttaaaaaaatata
ataacgataagtcctttaaaatatattctaatattatgaatgagagataccttaatgtatattataaagatatgtacgtgtcaa
aggtatatgataaactatttcctgttttcacagataaaaattgtctactaacattactaccttcagaaattatatacgaaatat
tatacatgctgacaattaacgatctttataatatatcgtatccacctaccaaagtatagttgtatttttctcatgcgatgtgtg
taaaaaaactgatattatataaatattttagtgccgtataatgaagatgacgatgaaaatgatggtacatatatatttcgtatc
attattgttattgctattccacagttacgccatagacatcgaaaatgaaatcacagaattcttcaataaaatgagagatactct
accagctaaagactctaaatggttgaatccagcatgtatgttcggaggcacaatgaatgatatagccgctctaggagagccatt
cagcgcaaagtgtcctcctattgaagacagtcttttatcgcacagatataaagactatgtggttaaatgggagaggctagaaaa
aaatagacggcgacaggtttctaataaacgtgttaaacatggtgatttatggatagccaactatacatctaaattcagtaaccg
taggtatttgtgtaccgtaactacaaagaatggtgactgtgttcagggtatagttagatctcatattaaaaaacctccttcatg
cattccaaaaacatatgaactaggtactcatgataagtatggcatagacttatactgtggaattctttacgcaaaacattataa
taatataacttggtataaagataataaggaaattaatatcgacgatattaagtattcacaaacgggaaagaaattaattattca
taatccagagttagaagatagtggaagatacaactgttacgttcattacgacgacgttagaatcaagatgtaaaatacttacgg
ttataccgtcgcaagaccacaggtttaaactaatactagatccaaaaatcaacgtaacgataggagaacctgccaatataacat
gcactgctgtgtcaacgtcattattgattgacgatgtactgattgaatgggaaaatccatccggatggcttataggattcgatt
ttgatgtatactctgttttaactagtagaggcggtatcaccgaggcgaccttgtactttgaaaatgttactgaagaatatatag
gtaatacatataaatgtcgtggacacaactattattttgaaaaaacccttacaactacagtagtattggagtaaatacacaatg
catttttatatacattactgaataattattattattatttatatcgtatttgtgctataacgcgactatctaggtatttgtatc
tcaccgatagagaacatataaatgtagactctattaaacagttgtgtaaaatatcagatcctaatagatgtggatgtacggctt
tagaaatgagttcattaaaatatgtgatatcaacggaacatatttatataattatactattgctgttagtataattattgattc
cacggaagaactaccaacagttactccaattacaacaacatataattatactatcgatgatagcactactgaagaactacaagt
gactcctcatatggatctccatcgatgatacatgtattaaaatactttccgaataagtcttttaaatattgtattaattatgaa
aaactatgctatgcgagtatgatacgatactagattttatctctagcgagagatgtcgttagaatcatttatcaacgaatatcg
ataacatgtgtcatttatacgttaaagtctgtccgtcttctctattgtttagactgtttgtagaatgctgtgatataaacaaac
tagtagacacaaatatttaactcatgatgaagttgagaatgatatgctttagctaatataaaaatatattaatccactatatat
tctagacttgatttaaaaccgataaactactactacgtactgtataagttaggagcagaccctaattatgtagatgatagaggt
aatacttctgcatctatatgtccacttatgagaaaacgtcatttaataagatgcatcgtgaaaagaaatttattaaagagttgg
taaaatatgaaaccgaaagtaaataatataggaaatacacctctacataactacgtatctcaatatgatatcactctcattcct
catccacaacccattaaaaaatggaaattaaagccctctattagcataaacggctacaggtctacctttacaatggcctttcct
tgtgcccagttcagaccctgtcattgccacgctactaaggactccctgaataccgtggccgacgtcagacattgtctgactgaa
tacatcctgtgggtttctcatagatggacccatagagaaagcgcagggtctctctacaggcttctcatctctttcagaactgat
gcaacggagctctttggtggtgagttgaaggattcacttccgtggagatcattaaatgactccatgaaaaccgccgaagaactt
cgtgcaatcattggactttgtactcaatcagctatcgtctctggaagagtcttcaacgataagtatatcgacatactacttatg
ctgcgaaagattctgaacgagaacgactatctcaccctcttggatcatatccgcactgctaaatactaaatctccttcatgctc
tctcactacactttttatcatcttatgaggaataattagcaccagaatagctatggattgcacatgtattctatgtcgtctact
ggatgaagatgtgacgtacaaaaaaataaaactagaaattgaaacgtgtcacaacttatcaaaacatatagatagacgaggaaa
caatgcgctacattgttacgtctccaataaatgcgatacagacattaagattgttcgactgttactctctcgcggagtcgagag
actttgtagaaacaacgaaggattaactccgctaggagcatacagtaagcatagatacgtaaaatctcagattgtgcatctact
gatatccagctattcgaattcctctaacgaactcaagtcgaatataaatgatttcgacttacgtctgctaaaatacctaattgt
ggataaacggatacgtccgtccaagaatacgaattatgcaatcaatggtctcggattggtggatatatacgtaacgacgcctaa
tccgagaccagaagtattgctatggcttcttaaatcagaatgttacagcaccggttacgtatttcgtacctgtatgtacaacag
tgatatgtgtaagaactctcttcattactatatatcgtctcatagagaatctctatccaaggatgtaattaaatgtttgatcga
taacaatgtttccatccaatactactggtcttgctcaaccatagatatagagattattaataaaggatgtggacacgtgtagag
tatacgacgtcagccctatattagaggcgtattatctaaacaagcgatttagagtaaccccatataatgtagacatggaaatcg
ttaatcttcttattgagagacgtcatactcttgtcgacgtaatgcgtagtattacttcgtacgattccagagaatataaccact
acatcatcgataacattctaaagagatttagacaacaggatgaatccatcgtacaagccatactgataaactacttacattacg
gcgatatggtaagtatacctatcattcaatgcatgttggataagacgacggacaacaactttgttaataataatctcgtcgatg
taaacgtcgtaaggtttatcgtggaaaatatggacacgcggctgtaaatcacatatctaacaatggccgtctatgtatgtacgg
tctgatattatcgagatttaataattgcgggtatcactgttatgaagatgtatttgatatactaagcaagtacatggatgatat
agatatgatcgataactctactatattacgcggtcgatgtcaataatatacaatttgcaaagcggttattggaatatggagcga
gtgtcacgctcgataatcaatacggccatccagaaaagcagttaccaaagagaagctagttgatttattactgagttaccatcc
cactctagagactatgattgacgcatttaatagagatatacgctatctatatcctgaaccattattcgcctgtatcagatacgc
cttaatcctagatgatgattttccttctaaagtaagtatgatatcgccggtcgtcataaggaactaaagcgctatagagcagac
attaatagaatgaagaatgcctacatatcaggcgtctccatgtttgatatattatttaaacgaagcaaacgccacagattgaga
tacgcaaagaacaatgagaggatcgactccattaaataatttatcatggagtgataatgtcctgtttccatggcatattacaaa
atcgattccgtccaagatgataaaaacatttaccggcatcataaacacggagtttattttatatgtctcgcataaacattacta
aaaaaatatattgttcggttttctttcacatctttaattatgaaaaagtaaatcattatgagatggacgcatcgttcgcgacag
tatgtggtacatacctaacgtatttatggacgacggtaagaatgaaggtcacgtttctgtcaacaatgtcgacgcgatcgtgta
acacgactcacaatagaatctgtgaatgctctcccgatcatggatgcaaggcatgtgtttcccaaacaaaatgtggaataggat
acggagtatccggagacgtcatctgttctccgtgtggtctcggaacatattctcacaccgtctcttccgcagataaatgcgaac
ccgtacccagaaatacctttaactatatcgatgtggaaattaacctgtatccagttaacgacacatcgtgtactcggacgacca
ctaccggtctcagcgaatccatctcaacgtcggaactaactattactatgaatcataaagactgcgatcccgtcttcttaataa
ggtagcgacttcaggtttctttacaggagaaaggtgtgcactctgaatttcgagattaaatgcaataacaaagattcttcctcc
aaacagttaacgaaagcaaagaatgatactatcatgccgcattcggagacagtaactctagcgtcgacatctatatactatata
gtaataccaatactcaagactacgaaactgatacaatctcttatcatgtgggtaatgtagccatatgcccggtagttgcgatat
acataaactgatcactaattccaaacccacccgctttttatagtaagtttttcacccataaatacaataattaatttctcgtaa
aagtagaaaatatattctaatttattgcacggtaaggaagtagaatcataaagaacagtactcaatcaatagcaatcatgaaac
aatatatcgtactggcatgcatgtgcctgccagtcttcagcaatcatcctcatcgtgtacggaagaagaaaacaaacatcatat
gggaatcgatgttattatcaaagtcacaaagcaagaccaaacaccgaccgatgataagatttgccaatccgtaacggaaattac
agagtccgagtcagatccagatcccgaggtggaatcagtcgaggatgtagatcctcctaccacttattactccatcatcggtgg
aggtctgagaatgaactttggattcaccaaatgtcctcagattaaatccatctcagaatccgctgatggaaagactgtgaggtg
tctatcgacatcagatgtagcgaagaagagaaagacagcgacatcaagacccatccagtactcgggtctaacatctctcataag
aaagtgagttacgaagatatcatcggttcaacgatcgtcgatacaaaatgtgtcaagaatctagagtttagcgttcgtatcgga
gacatgtgcaaggaatcatctgaacttgaggtcaagtatgtcgacggatcggcatctgaaggtgcaaccgatgatacttcactc
atcgattcaacaaaactcaaagcgtgtgtctgaatcgataactctattcatctgaaattggatgagtagggttaatcgaacgat
tcaggcacaccacgaattaaaaaagtgtaccggacactatattccggtttgcaaaacaaaaagttacctctcgcgacttcttct
ttttctgtctcaatagtgtgatacgattatgacactattcctatttcctttcagggtatcacaaaaatattaaacctctttctg
atggtctcatacaaaaatatttttattctctttctctctttgatggtctcataaaaaatatttttattctctttctctctttga
tggtctcataaaatatttttattctctttctctctttgatggtctcataaaaaatatttttattctctttctctctttgatggt
ctcataaaatatttttattctctttctctctttgatggtctcataaaaaatatttttattctctttctctctttgatggtctca
taaaaaatattaaacctctttctgatggtgtcactaaaatatttttattctctttctctcttcaatggagtcataaaatatttt
tattctctttctctcttcgatggtctcacaaaaatattaaacctctttctgatggtgtcactaaaatatttttattctctttct
ctcttcaatggagtcataaaatatttttattctctttctctctttgatggtctcacaaaaatatttttattctctttctctctt
tgatggtctcacaaaaatatttttattctctttctctctttgatggtctcacaaaaatatttttattctctttctctctttgat
ggtctcataaaaaaagttttacaaaaatatttttattctctttctctctttgatggtctcataaaaaaagttttacaaaaatat
ttttattctctttctctctttgatggtctcataaaaaaagttttacaaaaatatttttattctctttctctctttgatggtctc
ataaaaaatattaaacctctttctgatggtgtcactaaaatatttttattctcattctctcttcaatggagtcataaaatattt
ttattctctttctctcttcgatggtctcacaaaaatattaaacctctttctgatggtgtcactaaaatatttttattctcattc
tctcttcaatggagtcataaaatatttttattctctttctctcttcgatggtctcacaaaaatattaaacctctttctgatggt
gtcactaaaatatttttattctcattctctcttcaatggagtcataaaatatttttattctctttctctctttgatggtctcat
aaaaaaagttttacaaaaatatttttattctctttctctctttgatggtctcataaaaaatattaaacctctttctgatggtgt
cactaaaatatttttattctctttctctcttcaatggagtcataaaatatttttattctctttctctcttcgatggtctcacaa
aaatattaaacctctttctgatggtgtcactaaaatatttttattctcattctctcttcaatggagtcataaaatatttttatt
ctctttctctctttgatggtctcataaaaaaagttttacaaaaatatttttattctctttctctctttgatggtctcataaaaa
aagttttacaaaaatatttttattctctttctctctttgatggtctcataaaaaaagttttacaaaaatatttttattctcttt
ctctctttgatggtctcataaaaaaagttttacaaaaatatttttattctctttctctctttgatggtctcataaaaaatatta
aacctctttctgatggtgtcactaaaatatttttattctcattctctcttcaatggagtcataaaatatttttattctctttct
ctcttcgatggtctcacaaaaatattaaacctctttctgatggtgtcactaaaatatttttattctcattctctcttcaatgga
gtcataaaatatttttattctctttctctctttgatggtctcataaaaaaagttttacaaaaatatttttattctctttctctc
tttgatggtctcataaaaaaagttttacaaaaatatttttattctctttctctctttgatggtctcataaaaaaagttttacaa
aaatatttttattctctttctctctttgatggtctcataaaaaaagttttacaaaaatatttttattctctttctctctttgat
ggtctcacaaaaatattaaacctctttctgatggagtcgtaaaaaagttttatctctttctccttcgatggtctcacaaaaata
ttaaacctctttctgatggagtcgtaaaaaagttttatctctttctctcttcgatggtctcacaaaaatattaaacctctttct
gatggagtcgtaaaaaagttttatctctttctctcttcgatggtctcactaaaatattttttattctctttctgatgcatcaac
tatttcttaaacaataacgtccaacaacatatactcgtcgagcttatcaacatcccctatgcccatctaggttaccagacaatt
gtatatcataaaataatgtttataatttttacaaaaatatttttattctctttctctctttgatggtctcataaaaaaagtttt
acaaaaatatttttattctctttctctctttgatggtctcataaaaaatattaaacctctttctgatggtgtcactaaaatatt
tttattctcattctctcttcaatggagtcataaaatatttttattctctttctctcttcgatggtctcacaaaaatattaaacc
tctttctgatggtgtcactaaaatatttttattctcattctctcttcaatggagtcataaaatatttttattctctttctctct
ttgatggtctcataaaaaaagttttacaaaaatatttttattctctttctctctttgatggtctcataaaaaaagttttacaaa
aatatttttattctctttctctctttgatggtctcataaaaaaagttttacaaaaatatttttattctctttctctctttgatg
gtctcataaaaaaagttttacaaaaatatttttattctctttctctctttgatggtctcataaaaaaagttttacaaaaatatt
tttattctctttctctctttgatggtctcataaaaaaagttttacaaaaatatttttattctctttctctctttgatggtctca
taaaaaaagttttacaaaaatatttttattctctttctctctttgatggtctcataaaaaatattaaacctctttctgatggtg
tcactaaaatatttttattctctttctctcttcaatggagtcataaaatatttttattctctttctctcttcgatggtctcaca
aaaatattaaacctctttctgatggtgtcactaaaatatttttattctcattctctcttcaatggagtcataaaatatttttat
tctctttctctctttgatggtctcataaaaaaagttttacaaaaatatttttattctctttctctctttgatggtctcataaaa
aaagttttacaaaaatatttttattctctttctctctttgatggtctcataaaaaaagttttacaaaaatatttttattctctt
tctctctttgatggtctcataaaaaaagttttacaaaaatatttttattctctttctctctttgatggtctcataaaaaaagtt
ttacaaaaatatttttattctctttctctctttgatggtctcataaaaaatattaaacctctttctgatggtgtcactaaaata
tttttattctctttctctcttcaatggagtcataaaatatttttattctctttctctcttcgatggtctcacaaaaatattaaa
cctctttctgatggtgtcactaaaatatttttattctctttctctcttcaatggagtcataaaatatttttattctctttctct
ctttgatggtctcataaaaaaagttttacaaaaatatttttattctctttctctctttgatggtctcataaaaaaagttttaca
aaaatatttttattctctttctctctttgatggtctcataaaaaaagttttacaaaaatatttttattctctttctctctttga
tggtctcataaaaaaagttttacaaaaatatttttattctctttctctctttgatggtctcataaaaaaagttttacaaaaata
tttttattctctttctctctttgatggtctcataaaaaaagttttacaaaaatatttttattctctttctctctttgatggtct
cataaaaaaagttttacaaaaatatttttattctctttctctctttgatggtctcataaaaaatattaaacctctttctgatgg
tgtcactaaaatatttttattctcattttctctttctctcttcaatggagtcataaaatatttttattctctttctctctttga
tggtctcataaaaaatattaaacctctttctgatggtgtcactaaaatatttttattctcattctctcttcaatggagtcataa
aaaagttttatctctttctctcttcgatggtctcacaaaaatattaaacctctttctgatggagtcgtaaaaaagttttatctc
tttctctcttcgatggtctcacaaaaatattaaacctctttctgatgcatcaactatttcttaaacaataacgtccaacaacat
atactcatcccctatgcccatctaggttaccagacaattgtatatcataaaataatgtttataatttacacgttaaaatcatat
aataaaacgtagatcgtataatattttttggtatataaatgatctagtaaaatccatgtaggggatactgctcacattttttct
ttggtacaaaatttcacacaagtttttatacagacaaattcttgtccatatattttaaaacattgacttttgtactaagaaaaa
tatctagactaactatctctttctctttctctcttcgatggtctttctgatggagtcgtaaaaaagttttatctctttctctct
tcgatggtctcacaaaaatattaaacctctttctgatggagtcgtaaaaaagttttatctctttctctcttcgatggtctcaca
aaaatattaaacctctttctgatggagtcgtaaaaaagttttatctctttctccttcgatggtctcacaaaaatattaaacctc
tttctgatggagtcgtaaaaaagttttatctctttctctcttcgatggtctcacaaaaatattaaacctctttctgatggtgtc
actaaaatatttttattctctttctctcttcgatggtctcacaaaaatattaaacctctttctgatggagtcgtaaaaaagttt
tatctctttctccttcgatggtctcacaaaaatattaaacctctttctgatggagtcgtaaaaaagttttatctctttctctct
tcgatggtctcacaaaaatattaaacctctttctgatggagtcgtaaaaaagttttatctctttctccttcgatggtctcacaa
aaatattaaacctctttctgatggagtcgtaaaaaagttttatctctttctccttcgatggtctcacaaaaatattaaacctct
ttctgatggagtcgtaaaaaagttttatctctttctccttcgatggtctcacaaaaatattaaacctctttctgatggagtcgt
aaaaaagttttatctctttctctcttcgatggtctcacaaaaatattaaacctctttctgatggagtcgtaaaaaagttttatc
tctttctctcttcgatggtctcacaaaaatattaaacctctttctgatggagtcgtaaaaaagttttatctctttctccttcga
tggtctcacaaaaatattaaacctctttctgatagtctctataaagcgattgatttttcttaccctctagagtttcctacggtc
gttggtcacacatttttttctagacactaaataaatagtaagattaaattaattataaaattatgtatataatattaattataa
aattatgtatatgatttactaactttagttagataaattaataatacataaattttagtatattaatattataaattaataata
cataaattttagtatattaatattatattttaaatatttatttagtgtctagaaaaaaaggccggcctagcaggcc

[0075] Also disclosed are examples of synthetic Vaccinia virus (sVAC) fragments to reconstitute the complete Vaccinia virus genome. An example sequence of sVAC fragment 1 (F1, 66679 bp in length) (SEQ ID NO: 16):

tttttttctagacactaaataaaatatttaaaatataatattaatgtactaaaacttatatattattaatttatctaactaaagtta
gtaaattatatatataattttataattaatttaattttactaattttatttagtgtctagaaaaaaatgtgtgacccatgactgtag
gaaactctagagtgtaagaaagatcgatcgctttatagagaccatcagaaagaggtttaatatttttgtgagaccatcgaagagaga
aagagataaaacttttttacgactccatcagaaagaggtttaatatttttgtgagaccatcgaagagagaaagagataaaacttttt
tacgactccatcagaaagaggtttaatatttttgtgagaccatcgaaggagaaagagataaaacttttttacgactccatcagaaag
aggtttaatatttttgtgagaccatcgaaggagaaagagataaaacttttttacgactccatcagaaagaggtttaatatttttgtg
agaccatcgaagagagaaagagataaaacttttttacgactccatcagaaagaggtttaatatttttgtgagaccatcgaagagaga
aagagataaaacttttttacgactccatcagaaagaggtttaatatttttgtgagaccatcgaaggagaaagagataaaactttttt
acgactccatcagaaagaggtttaatatttttgtgagaccatcgaagagagaaagagataaaacttttttacgactccatcagaaag
aggtttaatatttttgtgagaccatcgaagagagaaagagataaaacttttttacgactccatcagaaagaggtttaatatttttgt
gagaccatcgaagagagaaagagataaaacttttttacgactccatcagaaagaggtttaatatttttgtgagaccatcgaagagag
aaagagataaaacttttttacgactccatcagaaagaggtttaatatttttgtgagaccatcgaagagagaaagagataaaactttt
ttacgactccatcagaaagaggtttaatatttttgtgagaccatcgaagagagaaagagaaagagatagttgatctagatatttttc
ttagtacaaaagtcaatgttttaaaatatatggacaagaatttgtctgtataaaaacttgtgtgaaattttgtaccaaagaaaaaat
gtgagcagtatcccctacatggattttactagatcatttatataccaaaaaatattatacgatctacgttttattatatgattttaa
cgtgtaaattataaacattattttatgatatacaattgtctggtaacctagatgggcataggggatgttgataagctcgacgagtat
atgttgttggacgttattgtttaagaaatagttgatgcatcagaaagagaataaaaaatattttagtgagaccatcgaagagagaaa
gagataaaacttttttacgactccatcagaaagaggtttaatatttttgtgagaccatcgaagagagaaagagataaaactttttta
cgactccatcagaaagaggtttaatatttttgtgagaccatcgaagagagaaagagataaaacttttttacgactccatcagaaaga
ggtttaatatttttgtgagaccatcgaagagagaaagagataaaacttttttacgactccatcagaaagaggtttaatatttttgtg
agaccatcgaagagagaaagagataaaacttttttacgactccatcagaaagaggtttaatatttttgtgagaccatcgaagagaga
aagagataaaacttttttacgactccatcagaaagaggtttaatatttttgtgagaccatcgaagagagaaagagataaaacttttt
tacgactccatcagaaagaggtttaatatttttgtgagaccatcgaagagagaaagagataaaacttttttacgactccatcagaaa
gaggtttaatatttttgtgagaccatcgaagagagaaagagataaaacttttttacgactccatcagaaagaggtttaatatttttg
tgagaccatcgaagagagaaagagataaaacttttttacgactccatcagaaagaggtttaatatttttgtgagaccatcgaagaga
gaaagagataaaacttttttacgactccatcagaaagaggtttaatatttttgtgagaccatcgaagagagaaagagataaaacttt
tttacgactccatcagaaagaggtttaatatttttgtgagaccatcgaagagagaaagagataaaacttttttacgactccatcaga
aagaggtttaatatttttgtgagaccatcgaagagagaaagagataaaacttttttacgactccatcagaaagaggtttaatatttt
tgtgagaccatcgaagagagaaagagataaaacttttttacgactccatcagaaagaggtttaatatttttgtgagaccatcgaaga
gagaaagagataaaacttttttacgactccatcagaaagaggtttaatatttttgtgagaccatcgaagagagaaagagataaaact
tttttacgactccatcagaaagaggtttaatatttttgtgagaccatcgaagagagaaagagataaaacttttttacgactccatca
gaaagaggtttaatatttttgtgagaccatcgaagagagaaagagaataaaaatattttatgactccattgaagagagaaagagaaa
atgagaatgagaataaaaatattttagtgacaccatcagaaagaggtttaatatttttgtgagaccatcgaagagagaaagagaata
aaaatattttatgactccattgaagagagaaagagaaaatgagaatgagaataaaaatattttagtgacaccatcagaaagaggttt
aatattttttatgagaccatcaaagagagaaagagaataaaaatatttttgtaaaactttttttatgagaccatcaaagagagaaag
agaataaaaatatttttgtaaaactttttttatgagaccatcaaagagagaaagagaataaaaatatttttgtaaaactttttttat
gagaccatcaaagagagaaagagaataaaaatatttttgtaaaactttttttatgagaccatcaaagagagaaagagaataaaaata
tttttgtaaaactttttttatgagaccatcaaagagagaaagagaataaaaatatttttgtaaaactttttttatgagaccatcaaa
gagagaaagagaataaaaatatttttgtaaaactttttttatgagaccatcaaagagagaaagagaataaaaatatttttgtaaaac
tttttttatgagaccatcagaaagaggtttaatatttttgtgataccctgaaaggaaataggaataggaataggaatagtgtcataa
tcgtatcacactattgagacagaaaaagaagaagtcgcgagaggtaactttttgtgaatgtagttaagaacatttttgttttgcaaa
ccggaatatagtgtccggtacacttttttaattcgtggtgtgcctgaatcgttcgattaaccctactcatccaatttcagatgaata
gagttatcgattcagacacacgctttgagttttgttgaatcgatgagtgaagtatcatcggttgcaccttcagatgccgatccgtcg
acatacttaaatccatccttgacctcaagttcagatgattccttgcacatgtctccgatacgaacgctaaactctagattcttgaca
cattttgtatcgacgatcgttgaaccgatgatatcttcgtaactcactttcttatgagagatgttagacccgagtactggatgggtc
ttgatgtcgctgtctttctcttcttcgctacatctgatgtcgatagacacctcacagtctttgatcatagccagagcttcttcatga
gtgatcgcgggagagtccttaccttgtcctggggacacgctggacaatctagcattcactgtgtttccatcagcggattctgagatg
gatttaatctgaggacatttggtgaatccaaagttcattctcagacctccaccgatgatggagtaataagtggtaggaggatctaca
tcctcgactgatgtggaatcatcttctgattccacctcgggatctggatctgactcggactctgtaatttccgttacggattggcaa
atcttatcattggtcggtgtttggtcttgctttgtgactttgataataacatcgattcccatatgatgtttgttttcttcttccgta
cacgaggaggaggatgaggatgattgctgaagactggcaggcacatgcatgccaggacgatatattgtttcatgattgctattgatt
gagtactgttctttatgattctacttccttaccgtgcaataaattagaatatattttctacttttacgagaaattaattattgtatt
tattatttatgggtgaaaaacttactataaaaagcgggtgggtttggaattagtgatcagtttatgtatatcgcaactaccgggcat
atggctatcgacatcgagaacattacccacatgataagagattgtatcagtttcgtagtcttgagtattggtattactatatagtat
atagatgtcgacgctagatagacagtctccgaatgcggcatgataccgtcatcattctttgctttcgttaactgtttggaggaaaaa
tttttgttattgcatttaatctcgaaattcagagtgcacacctttctcctgtaaagaaacctgaagttgctaccttattaaggacgg
agaagtattcctcacgaaatacgggattacagtctttatgattcatagtaatagttagttccgacgttgagatggattcgctgagac
cggtagtggtcgttaactggatacagattaatttccacatcgatatagttaaaggtattactgggtacgggttcgcatttatctgcg
gaagagacggtgtgagaatatgttccgagaccacacggagaacagatgacgtctccggatactccgtatcctattccacattttgtt
tgggaaacacatgccttgcatccggatgatcctttgagaagacaataatatccgggagagcattcacagattctattgtgagtcgtg
ttacacggtcgcgtcttccgttacaacttagacaagcgggtaaatgattattgcgagatgtgaaggtacccgaaccacacggcgtac
attgtgtgttagtcttgctatcgcataatctggaagcgtatgttcccggacacaaattatggcgtttgtattcgttgtctttacact
ttccatcggatggtgcatgcggtgctatatctcttccgtttattattatacatgagagaaacaatatatacgagtataatacggact
tcatgatttaataatgtagtaatcgtcgtcttgttcctgtttcctacttctccaatcatatagatattttctttctatcatggataa
tatttgtaatggttcttttcgtacaacatactgtttagatgatattgcgcataatttccggaggcaaatacgatagtctagattgac
cgatggtagactctaatttattgagtgctttgtcgacgagtttacttttacgctccatcgatagatggcactgttctatgagatcgt
cgtacatgggaaatgaaatgtgactgtctgaatgtatggctttaagatagctgtgataccgtatacaggtcggtgtcggagattcga
atctctttaaggcgacttatgtcacgatgatggaatctatcttatcgaatgatatatttttcataaatacacttttatagtcctcgt
ttaaacagaatttactatgtagttccgcgaatgactcgtcccttaataggcagtaggctattatcttctttacgtagtaatcgtcgt
agggagagacatcttgtagaacaacgatttaatcataggtagagatactttcagtctgtggtggatgatgtcattcacaacatccgc
cttgtatatgatgtttctgttttcaaacaccaagtcgaataccgtctttagtcggaaggttgatgtcgtatccgatgtatgaggcaa
cattgttgttacaattttgaaaggcggtattatagtattcgtctttctgaatgtcgaacctatctagtagataccgtagtatattga
gagtgtatccttgattatgttttatgaatagataaagtagatgttgtccttcttccttttgttcgtgccaattgagtaacattatga
gaatatgacctgttgcacaatcgttccatgatgggtgtacaatcaagattattacgtatcctcgtatcggctcctcgagataaaaga
gcatacaccacacgaggactatgtttggtatactgttgaaggtaagtgtgtaaccgcgttaatgtttgctccataatctattatcgc
gtagatgaatcgcttctcggctcgcatcttagtgtgacttaacttgtaataattgcttttgtagaacgtggatatgtgtttacagta
gtaatgaagagaagtgagttcatcctcgtcggatcctttgtacagaacgtaatagtttaagctcccattgaatttatatctaagata
acacagcaatagatcggatgatttactaaagtcatcaatggtgtccgttagtatatcaaagatcttgttatcgattgatagtggtgt
cctttttcatccttgctatcaaagttacgcatgccgtggtgtaacaatatctttaatacagatggattaaatcgtgtattcatcgta
tagcaatgtaatggagagttacctcgtttattcagatcgcagtgtttaataactagcttaaacagatgagacgatgtatccacatca
aagaacgtgaaatacatatgacagacattgttgacagaaacgtgaccttcattcttaccgtcgtccataaatacgttaggtatgtac
cacatactgtcgcgaacgatgcgtacaatctcgtccatctcataatgatttactttttcataattaaagatgtgaaagaaaaacaga
acaatatatttttttagtaatgtttatgcgagacatataaaataaactccgtgtttatgatcatttttaacagcaacacattcaata
ttgtattgttatttttatattatttacacaattaacaatatattattagtttatattactgaattaataatataaaattcccaatct
tgtcataaacacacactgagaaacagcataaacacaaaatccatcaaaaatgtcgatgaaatatctgatgttgttgttcgctgctat
gataatcagatcattcgccgatagtggtaacgctatcgaaacgacatcgccagaaattacaaacgctacaacagatattccagctat
cagattatgcggtccagagggagatggatattgtttacacggtgactgtatccacgctagagatattgacggtatgtattgtagatg
ctctcatggttatacaggcattagatgtcagcatgtagtattagtagactatcaacgttcagaaaacccaaacactacaacgtcata
tatcccatctcccggtattatgcttgtattagtaggcattattattattacgtgttgtctattatctgtttataggttcactcgacg
aactaaactacctatacaagatatggttgtgccataatttttataaatttttttatgagtatttttacaaaaaaaatgtataaagtg
tatgtcttatgtatatttataaaaatgctaagtatgcgatgtatctatgttatttgtatttatctaaacaatacctctacctctaga
tattatacaaaaattttttatttcggcatattaaagtaaaatctagttaccttgaaaatgaatacagtgggtggttccgtatcacca
gtaagaacataatagtcgaatacagtatccgattgagattttgcatacaatactagtctagaaagaaatttgtaatcatcttctgtg
acgggagtccatatatctgtatcatcgtctagtttatcagtgtcccatgctatattcctgttatcatcattagttaatgaaaataac
tctcgtgcttcagaaaagtcaaatattgtatccatacatacatctccaaaactatcgcttatacgtttatctttaacgatacctata
cctagatggttatttactaacagacattttccagatctattgactataactcctatagtttccacatcaaccaagtaatgatcatct
attgttatataacaataacataactcttttccatttttatcagtatgtatatctatatcaacgtcgtcgttgtagtgaatagtagtc
attgatctattatatgaaacggatatgtctagaacggcaattgttttacgtccagttaacactttctttgatttaaagtctagagtc
tttgcaaacataatatccttatccgactttatatttcctgtagggtggtataattttattttgcctccacatatcggtgtttccaaa
tatattactagacaatattccatatagttattagttaagggtacccaattagaacacgtacgcttattatcatcatttggatcgtat
ttcataaaagttattgtactatcgatgtcaacacattctacattttttaatcgtctatatagtatttttctgatattttctataata
tcagaattgtcttccatcggaagttgtatactatcggaatcagttacatgtttaaataattctctgatgtcattccttatacaatca
aattcattattaaacagtttaatagtctgtagacctttatcgtcgtaaatatccattgtcttattagttacgcttatttttatgtgt
tttacgttgctttattatattttataagaatgattgtttgacgaatcacgagaactattaagacacattattaggtatatattataa
aaaagtttttgattacgatgttataagaggaaagaggacacattaacatcatacatcaattaactacattcttataacatcgtaatc
aaaagaattgcaattttgatgtataacaactgtcaatgggttatggaattgtatattacatattatacggtatgttggtaacgacaa
ataccgatcggtaattgtctgccggtgtaatagaattatatatatctatctattacaccggctgagtatgcataataataagttgtg
gtagtatgatctccatatttataatttaggactttgtattcagtatttttggaatcataaaaaataaaaaaaagttttactaattta
aaatttaaaaagtatttacatttttttcactgtttagtcgcggatatggaattcgatcctgccaaaatcaatacatcatctatagat
catgtaacaatattacaatacatagatgaaccaaatgatataagactaacagtatgcattatccgaaatattaataacattacatat
tatatcaatatcacaaaaataaatacacatttggctaatcaatttcgggcttggaaaaaacgtatcgccggaagggactatatgact
aacttatctagagatacaggaatacaacaatcaaaacttactgaaactatacgtaactgtcaaaaaaatagaaacatatatggtcta
tatatacactacaatttagttattaatgtggttattgattggataaccgatgtgattgttcaatcaatattaagagggttggtaaat
tggtacatagctaataatacctatacacccaataatacaacaaccatttctgagttggatatcatcaaaatactggataaatacgag
gacgtgtatagagtaagtaaagaaaaagaatgtggaatttgctatgaagttgtttactcaaaacgatagatactttggtttattgga
ttcgtgtactcatatattttgcataacatgcatcaatatatggcataaaacacgaagagaaaccggtgcgtcggataattgtcctat
atgtcgtacccgttttagaaacataacaatgagcaagttctataagctagttaactaataaataaaaagtttaatttgttgacgacg
tatgtcgttatttttctcgtatgaaagattaaattcaattcaattcgttgtttctaatataatctgccgtattggatggattctcaa
gacaattgcatttagattatattatcatgaataaaaatagtagcacgcactacttcagccaaatattcttttttgaaacgccatcta
tcgtagtgaggacacaagtgaacctataattatcaaatttattagtatcagtcacatgaaggactttctgtagagtgacgattctac
catctatggtactaacggtttcatcctccttgataccctcacccaaatgttctataaatttagcatcctcgtccgatctcatatcct
ttgccaaccaatacatgtagctaaaattaggcataaatttcacacatccagtgcaacgaaattctccagaagatgttacgatgttta
ggttaggacatttgatttcgtcggcattaacatatgggtgaacacacccatacatgaaagcgatgagaaataggattctcatcttgc
caaaatatcactagaaaaaatttatttatcaattttaaaggtataaaaaatacttattgttgctcgaatattttgtatttgatggta
tacggaagattagaaatgtaggtattatcatcaactgattctatggttttatgtattctatcatgtttcactattgcgtcggaaata
atatcatatgcttccacatatattttattttgttttaactcataatactcacgtaattctggattattggcatatctatgaataatt
ttagctccatgatcagtaaatattaatgagaacatagtattaccacctaccattatttttttcatttcgttcaattcttgattgcaa
agatctatataatcattatagcgttgacttatggactctggaatcttagacgatgtacagtcatctataatcatggcatatttaata
cattgttttatagcatagtagttatctacgatgttagatatttctctcaatgaatcaatcacacaatctaatgtaggtttatgacat
aatagcattttcagcagttcaatgtttctagattcgttgatggcaatggctatacatgtatatccgttatttgatctaatgttgaca
tctgaaccggattctagcagtaaagatactagagattgtttattatatctaacagccttgtgaagaagtgtttctcctcgtttgtca
atcatgttaatgtctttaagataaggtaggcaaatgtttatagtactaagaattgggcaagcataagacatgtcacaaagacccttt
ttgtatgtataagtgtaaaaattataacattcatagttggatttacataggtgtccaatcgggatctctccatcatcgagataattg
atggcatctcccttccttttttagtagatatttcatcgtgtaagaatcaatattaatatttctaaagtattcgtgtatagcctcttt
atttaccacagttccatattccactagagggatatcgccgaatgtcatatactcaattagtatatgttggaggacatccgagttcat
tgttttcaatatcaaaaagatggtttccttatcatttctccatagtggtacaatactacacattattccgtgcggctttccattttc
caaaaacaatttgaccaaatctaaatctacatctttattgtatctataatcactatttagataatcagccataattactcgagtgca
acatgttagatcgtctatatatgaataagcagtgttatctattcctttcattaacaatttaacgatgtctatatctatatgagatga
cttaatataatattgaagagctgtacaatagtttttatctatagaagacggcttgattccgtgattaattagacatttaacaacttc
cggacgcacatatgctctcgtatccgactttgaatacagatgagagatgatatacagatgcaatacggtaccgcaatttcgtagttg
ataatcatcatacgcgtatcagtactcgtcctcataaagaacactgcagccattttctatgaacaaatcaataattttaggaacagg
atcattgtcattacataattttctataactgaacgatggttttcacatttaacactcaagtcaaatccatgttctaccaacaccttt
atcaagtcaacgtctacatttttggatttcatatagctgaatatattaaagtcatttatgttgctaaatccagtggcttctagtaga
gccatcgctatatcctttaactttaacatgtctactatttgtgtattcttctaatggggtagctgtctccaatttttgcgtaatgga
ttagtgccactgtctagtagtagtttgacgacctcgacattattacaatgctcattaaaaaggtatgcgtgtaaagcattattcttg
aattggttcctggtatcattaggatctctgtctctcaacatctgtttaagttcatcgagagccacctcctcattttccagatagtca
aacattttgactgaatgagctactgtgaactctatacacccacacaactaatgtcattaaatattatttttttgaatgtatttatac
catgtcaaaaacttgtacaattattaataaaaataatttagtgtttaaattttaccagttccagattttacacctccgttaacccca
ctttttacaccactggacgatcctcctccccacattccaccgccaccagatgtataagttttagatcctttattactaccatcatgt
ccatggataaagacactccacatgccgccactactaccccctttagaagacatattaataagacttaaggacaagtttaacaataaa
attaatcacgagtaccctactaccaacctacactattatatgattatagtttctatttttacagtaccttaactaaagtctctagtc
acaagagcaatactaccaacctacactattatatgattatagtttctatttttataggaacgcgtacgagaaaatcaaatgtctaat
ttctaacggtagtgttgataaacgattatcgtcaatggatacctcctctatcatgtcgtctattttcttactttgttctattaactt
attagcattatatattatttgattataaaacttatattgcttattagcccaatctgtaaatatcggattattaacatatcgtttctt
tgtaggtttatttaacatgtacatcactgtaagcatgtccgtaccatttattttaatttgacgcatatccgcaatttctttttcgca
gtcggttataaattctatatatgatggatacatgctacatgtgtacttataatcgactaatatgaagtacttgatacatattttcag
taacgatttattattaccacctatgaataagtacctgtgatcgtctaggtaatcaactgttttcttaatacattcgatggttggtaa
tttactcagaataatttccaatatcttaatatataattctgctatttctgggatatatttatctgccagtataacacaaatagtaat
acatgtaaacccatattttgttattatattaatgtctgcgccattatctattaaccattctactaggctgacactatgcgacttaat
acaatgataaagtatactacatccatgtttatctattttgtttatatcatcaatatacggcttacaaagttttagtatcgataacac
atccaactcacgcatagagaaggtagggaataatggcataatatttattaggttatcatcattgtcattatctacaactaagtttcc
attttttaaaatatactcgacaactttaggatctctattgccaaatttttgaaaatatttatttatatgcttaaatctatataatgt
agctccttcatcaatcatacatttaataacattgatgtatactgtatgataagatacatattctaacaatagatcttgtatagaatc
tgtatatcttttaagaattgtggatattaggatattattacgtaaactattacacaattctaaaatataaaacgtatcacggtcgaa
taatagttgatcaactatataattatcgattttgtgatttttcttcctaaactgtttacgtaaatagttagatagaatattcattag
ttcatgaccactatagttactatcgaataacgcgtcaaatatttcccgtttaatatcgcatttgtcaagataataatagagtgtggt
atgttcacgataagtataataacgcatctcttttttgtgtgaaattaaatagtttatcacgtccaaagatgtagcataaccatcttg
tgacctagtaataatataataatagagaactgttttacccattctatcatcataatcagtggtgtagtcgtaatcgtaatcgtctaa
ttcatcatcccaattataatattcaccagcacgtctaatctgttctattttgatcttgtatccatactgtatgttgctacatgtagg
tattcctttatccaataatagtttaaacacatctacattgggatttgatgttgtagcgtatttctctacaatattaataccattttt
gatactatttatttctatacctttcgaaattagtaatttcaataagtctatatcgatgttatcagaacatagatattcgaatatatc
aaaatcattgatatttttatagtcgactgacgacaataacaaaatcacaacatcgtttttgatattattatttttcttggtaacgta
tgcctttaatggagtttcaccatcatactcatataatggatttgcaccactttctatcaatgattgtgcactgctggcatcgatgtt
aaatgttttacaactatcatagagtatcttatcgttaaccatgattggttgttgatgctatcgcattttttggtttctttcatttca
gttatgtatggatttagcacgtttgggaagcatgagctcatatgatttcagtactgtagtgtcagtactattagtttcgatcagatc
aatgtctagatctatagaatcaaaacacgataggtcagaagataatgaatatctgtacgcttctttttgtactgtaacttctggttt
tgttagatggttgcatcgtgctttaacatcaatggtacaaattttatcctcgctttgtgtatcatattcgtctctagtataaaattc
tatattcagattatcatgcgatgtgtatacgctaacggtatcaataaacggagcacaccatttagtcataacagtaatccaaaattt
tttaaagtatatcttaacgaaagaagttgtgtcattgtctacggtgtatggtactagatcctcataagtgtatatatctagagtaat
gtttaatttattaaatggttgataatatggatcctcatgacaatttccgaagatggaaatgagatatagacatgcaataaatctaat
cgaagacatggttactccttaaaaaaatacgaataatcaccttggctatttagtaagtgtcatttaacactatactcatattaatcc
atggactcataatctctatacgggattaacggatgttctatatacggggatgagtagttttcttctttaactttatactttttacta
atcatatttagactgatgtatgggtaatagtgtttaaagagttcgttctcatcatcagaataaatcaatatctctgtttttttgtta
tacagatgtattacagcctcatatattacgtaatagaacgtgtcatctaccttattaactttcaccgcatagttgtttgcaaatacg
gttaatcctttgacctcgtcgatttccgaccaatctgggcgtataatgaatctaaactttaatttcttgtaatcattcgaaataatt
tttagtttgcatccgtagttatcccctttatgtaactgtaaatttctcaacgcgatatctccattaataatgatgtcgaattcgtgc
tgtatacccatactgaatggatgaactaacgaatatcaacggcgttaatagtaatttactttttcatctttacatattgggtactag
ttttactatcataagtttataaattccacaagctactatggaataagccaaccatcttagtataccacacatgtcttaaagtttatt
aattaattacatgttgttttatatatatcgctacgaatttaaagagaaatcagtttaggaagaaaaaaattatctatctacatcatc
acgtctctgtattctacgatagagtgctactttaagatgagacatatccgtgtcatcaaaaatatactccattaaaatgattattcc
ggcagcgaacttgatattggatatatcacaacctttgttaatatctacgacaatagacagcagtcccatggttccataaacagtgag
tttatctttctttgaagcgatagtttgtagagatcttataaaaccgtcaaacgacatcgcatttatatctttagctaattcatatat
gttaccatcgtaatatctaaccgcgtctatcttaaacgtttccatcgctttaaagacgtttccgatagatggtctcatttcatcagt
catactgagccaacaaatataatcgtgtataacatctttgatagaatcagactctaaagaaaacgaatcggctttattatacgcatt
catgataaacttaatgaaaaatgtttttcgttgtttaagttggatgaatagtatgtcttaataattgttattatttcattaattaat
atttagtaacgagtacactctataaaaacgagaatgacataactagttatcaaagtgtctaggacgcgtaattttcatatggtatag
atcctgtaagcattgtctgtattctggagctattttctttatcgcattagtaagttcagaatatgttataaatttaaatcgaataac
gaacatgactttagtaaagtcgtctatattaactcttttattttctagccatcgtaataccatgtttaagatagtatattctctagt
tactacgatctcatcgttgtctagaatatcacatactgaatctacatccaattttagaaattggtctgtgttacatatctcttctat
attattgttgatgtattgtcgtagaaaactattacgtagaccattttctttataaaacgaatatatagtactccaattatctttacc
gatatatttgcacacataatccattctctcaatcactacatctttaagattttcgttgttaagatatttggctaaactatataattc
tattagatcatcaacagaatcagtatatatttttctagatccaaagacgaactctttggcgtcctctataatattcccagaaaagat
attttcgtgttttagtttatcgagatctgatctgttcatatacgccatgattgtacggtacgttatgataaccgcataaaataaaaa
tccattttcatttttaaccaatactattcataattgagattgatgtaatactttgttactttgaacgtaaagacagtacacggatcc
gtatctccaacaagcacgtagtaatcaaatttggtgttgttaaacttcgcaatattcatcaatttagatagaaacttatactcatca
tctgttttaggaatccatgtattattaccactttccaacttatcattatcccaggctatgtttcgtccatcatcgttgcgcagagtg
aataattcttttgtattcggtagttcaaatatatgatccatgcatagatcggcaaagctattgtagatgtgatttttcctaaatcta
atataaaactcgtttactagcaaacactttcctgatttatcgaccaagacacatatggtttctaaatctatcaagtggtggggatcc
atagttatgacgcagtaacatagattattacattcttgactgtcgctaatatctaaatatttattgttatcgtattggattctgcat
atagatggcttgtatgtcaaagatatagaacacataaccaatttatagtcgcgctttacattctcgaatctaaagttaagagattta
gaaaacattatatcctcggatgatgttatcactgtttctggagtaggatatattaaagtctttacagatttcgtccgattcaaataa
atcactaaataatatcccacattatcatctgttagagtagtatcattaaatctattatattttatgaaagatatatcactgctcacc
tctatatttcgtacatttttaaactgtttgtataatatctctctgatacaatcagatatatctattgtgtcggtagacgataccgtt
acatttgaattaatggtgttccattttacaacttttaacaagttgaccaattcatttctaatagtatcaaactctccatgattaaat
attttaatagtatccattttatatcactacggacacaaagtagctgacataaaccattgtataatttttatgttttatgtttattag
cgtacacattttggaagttccggcttccatgtatttcctggagagcaagtagatgatgaggaaccagatagtttatatccgtacttg
cacttaaagtctacattgtcgttgtatgagtatgatcttttaaacccgctagacaagtatccgtttgatattgtaggatgtggacat
ttaacaatctgacacgtgggtggatcggaccattctcctcctgaacacaggacaccagagttaccaatcaacgaatatccactattg
caactataagttacaacgctcccatcggtataaaaatcctcgtatccgttatgtcttccgttggatatagatggaggggattggcat
ttaacagattcacaaataggtgcctcgggattccataccatagatccagtagatcctaattcacaatacgatttagattcaccgatc
aaatgatatccgctattacaagagtacgttatactagagccaaagtctactccaccaatatcaagttggccattatcgatatctcga
ggcgatgggcatctccgtttaatacattgattaaagagtgtccatccagtacctgtacatttagcatatataggtcccattttttgc
tttctgtatccaggtagacatagatattctatagtgtctcctatgttgtaattagcattagcatcagtctccacactattcttaaat
ttcatattaatgggtcgtgacggaatagtacagcatgatagaacgcatcctattcccaacaatgtcaggaacgtcacgctctccacc
ttcatatttatttatccgtaaaaatgttatcctggacatcgtacaaataataaaaagcccatatatgttcgctattgtagaaattgt
ttttcacagttgctcaaaaacgatggcagtgacttatgagttacgttacactttggagtctcatctttagtaaacatatcataatat
tcgatattacgagttgacatatcgaacaaattccaagtatttgattttggataatattcgtattttgcatctgctataattaagata
taatcaccgcaagaacacacgaacatctttcctacatggttaaagtacatgtataattctatccatttgtcttccttaactatatat
ttgtatagataattacgagtctcgtgagtaattccagtaattacatagatgtcgccgtcgtactctacagcataaactatactatga
tgtctaggcatgggagacttttttatccaacgatttttagtgaaacattccacatcgtttaatactacatatttttcatacgtggta
taaactccacccattacatatatatcatcgtttacgaataccgacgcgcctgaatatctaggagtaattaagtttggaagtcttatc
catttcgaagtgccgtgtttcaaatattctgccacacccgttgaaatagaaaattctaatcctcctattacatataactttccatcg
ttaacacaagtactaacttctgattttaacgacgacatattagtaaccgttttccattttttcgtttcaagatctacccgcgatacg
gaataaacatgtctattgttaatcatgccgccaataatgtatagacaattatgtaaaacatttgcattatagaattgtctatctgta
ttaccgactatcgtccaatattctgttctaggagagtaatgggttattgtggatatataatcagagtttttaatgactactatatta
tgttttataccatttcgtgtcactggctttgtagatttggatatagttaatcccaacaatgatatagcattgcgcatagtattagtc
ataaacttgggatgtaaaatgttgatgatatctacatcgtttggatttttatgtatccactttaataatatcatagctgtaacatcc
tcatgatttacgttaacgttttcgtgggataagatagttgtcagttcatcctttgataattttccaaattctggatcggatgtcacc
gcagtaatattgttgattatttctgacatcgacgcattatatagttttttaattccatatcttttagaaaagttaaacatccttata
caatttgtggaattaatattatgaatcatagtttttacacatagatctactacaggcggaacatcaattattatggcagcaactagt
atcatttctacattgtttatggtgatgtttatcttcttccagcgtatatagtctaatagcgattcaaacgcgtgatagtttatacca
ttcaatataatcgcttcatcctttagatggtgatcctgaattcgtttaaaaaaattatacggagatgccgtaataatttccttattc
acttgtataatttccccattgatagaaaatatcacgctttccattcttgaagtactataagtaattatagtataatgtaaaggttta
tatattcaatattttttataaaaaaatcattttgacattaattcctttttaaatttccgtctatcatctatagaaacgtattctatg
aatttataaaatgcttttacgtgtcctatcgtaggcgatagaaccgctaaaaagcctatcgaatttctacaaaagaatctgttatat
ggtatagggagagtataaaacattaaatgtccgtacttattaaagtattcagtagccaatcctaactctttcgaatacttattaatg
gctcttgttctgtacgaatctatttttttgaacaacggacctagtggtatatcttgttctatgtatctaaaataatgtctgactaga
tccgttagtttaatatcctcagtcatcttgtctagaatggcaaatctaactgcgggtttaggctttagtttagtttttatatctaca
tctatgtctttatctaacaccaaaaatataatagctaatattttattacaatcatccggatattcttctacgatctcactaactaat
gtttctttggttatactagtatagtcactatcggacaaataaagaaaatcagatgatcgatgaataatacatttaaattcatcatct
gtaagatttttgagatgtctcattaaaatattattagggtcagtactcattatcattcggcagctattacttattttatttttctgt
attttattatttttcaccatatagatcaatcattagatcatcaaaatatgtttcaatcatcctaaagagtatggtgaatgactcttc
ccatctaatttctgaacgttcaccaatgtctctagccactttggcactaatagcgatcattcgcttagcgtcttctatattattaac
tggttgattcaatctatctagcaatggaccgtcggacagcgtcattctcatgttcttaatcaatgtacatacatcgccgtcatctac
caattcatccaacaacataagctttttaaaatcatcattataataggtttgatcgttgtcatttctccaaagaatatatctaataag
tagagtcctcatgcttagtaatttaactattttagttaacaactattttttatgttaaatcaattagtacaccgctatgtttaatac
ttattcatattttagtttttaggattgagaatcaatacaaaaaattaatgcatcattaattttagaaatacttagtttccacgtagt
taatgaaacatttgaactcatcgtacaggacgttctcgtacaggacgtaactataaaccggtttatatttgttcaagatagatacaa
atccgataactttttttacgaattctacgggatccactttaaaagtgtcataccgggttctttttattcttttaaacagatcaatgg
tgtgatgttgattaggtcttttacgaatttgatatagaatagcgttcacatatcctccataatggtcaatcgccatttgttcgtatg
tcataaattctttaattatatgacactgtgtattatttagttcatccttgttcatcattaggaatctatccaaaatggcaattatac
tagaactataggtgcgttgtatacacatattgatgtgtctgtttatacaatccatgatatttggatccatgctactaccttcgggta
aaattgtagcatcatataccatttctagtactttaggttcattattatccattgcagaggacgtcatgatcgaatcctaaaaaaata
tattatttttatgttattttgttaaaaataatcatcgaatacttcgtaagatactccttcatgaacataatcagttacaaaacgttt
atatgaagtaaagtatctacgatttttacaaaagtccggatgcataagtacaaagtacgcgataaacggaataataatagatttatc
tagtctatctttttctatagctttcatagttagatacatggtctcagaagtaggattatgtaacatcagcttcgataaaatgactgg
gttatttagtcttacacattcgctcatacatgtatgaccgttaactacaaagtctacactaaaatgattgaacaatagatagtctac
cattgtttcgtattcagatagtacagcgtagtacatagcatcttcacaaattatatcattgtctaatagatatttgacgcatcttat
ggatcccacttcaacagccatcttaaaatcggtagaatcatattgctttcctttatcattaataatttctaaaacatcatctctatc
ataaaagatacaaatattaactgtttgatccgtaataacattgctagtcgatagcaatttgttaataagatgcgctgggctcaatgt
cttaataagaagtgtaagaggactatctccgaatttgttttgtttattaacatccgttgatggaagtaaaagatctataatgtctac
attcttgactgttttagagcatacaatatggagaggtgtatttccatcatgatctggttttgagggactaattcctagtttcatcat
ccatgagattgtagaagcttttggattgtctgacataagatgtctatgaatatgatttttgccaaatttatccactatcctggcttc
gaatccgatggacattatttttttaaacactctttctgaaggatctgtacacgccaacaacggaccacatccttcttcatcaaccga
gttgttaatcttggctccatactgtaccaataaatttattctctctatgacttcatcatctgttcccgagagataatatagaggtgt
tttattatgtttatcacacgcgtttggatctgcgccgtgcgtcagcagcatcgcgactattctattattattaattttagaagctat
atgcaatggataatttccatcatcatccgtctcatttggagagtatcctctatgaagaagttcttcgacaaatcgttcatctagtcc
tttaattccacaatacgcatgtagaatgtgataattatttccagaaggttcgatagcttgtagcatattcctaaatacatctaaatt
tttactattatatttggcataaagagatagataatactcggccgacataatgttgtccattgtagtataaaaattaatatttctatt
tctatttctgtatatttgcaacaatttactctctataacaaatatcataacttagttcttttatgtcaagaaggcactggtttagtt
catctataaatgtcacgccataactaccacgcatgctatactcagaattatgataaagatatttatccttggggtgtaggtaatggg
gattaatctttgttggatcagtctctaagttaacacatgtcacacatgatccatttatagttatatcacacgatgatgatttatgaa
ttgattccggaagatcgctatcgtattttgtggttccacaattcatttccatacatgttattgtcacactaatattatgatgaactt
tatctagccgctgagtggtaaacaacagaacagatagtttattatctttaccaacaccctcagccgctgccacaaatctctgatccg
tatccatgatggtcatgtttatttctagtccgtatccagtcaacactatgttagcatttctgtcgatatagctttcactcatatgac
actcaccaataatagtagaattaatgtcgtaatttacaccaatagtgagttcggcggcaaagtaccaataccggtaatcttgtcgag
gaggacatatagtattcttgtattctaccgaatacccgagagatgcgatacaaaagagtaagactaatttgtaaaccatcttactca
aaatatgtaacaatagtacgatgcaatgagtaagacaataggaaatctatcttatatacacataattattctatcaattttaccaat
tagttagtgtaatgttaacaaaaatgtgggagaatctaattagtttttctttacacaattgacgtacatgagtctgagttccttgtt
tttgctaattatttcatccaatttattattcttgactatatcgagatcttttgtataggagtcagacttgtattcaacatgcttttc
tataatcattttagctatttcggcatcatccaatagtacattttccagattagcagaatagatattaatgtcgtatttgaacagagc
ctgtaacatctcaatgtctttattatctatagccaatttaatgtccggaatgaagagaagggaattattggtgtttgtcgacgtcat
atagtcgagcaagagaatcatcatatccacgtgtccattttttatagtgatgtgaatacaactaaggagaatagccagatcaaaagt
agatggtatctctgaaagaaagtaggaaacaatacttacatcattaagcatgacggcatgataaaatgaagttttccatccagtttt
cccatagaacatcagtctccaatttttcttaacaaacagttttaccgtttgcatgttaccactatcaaccgcataatacaatgcggt
gtttcccttgtcatcaaattgtgaatcatccagtccactgaatagcaaaatctttactattttggtatcttccaatgtggctgcctg
atgtaatggaaattcattctctagaagatttttcaatgctccagcgttcaacaacgtacatactagacgcacgttattatcagctat
tgcataatacaaggcactatgtccatggacatccgccttaaatgcatctttgctagagagaaagcttttcagctgcttagacttcca
agtattaattcgtgacagatccatgtctgaaacgagacgctaattagtgtatattttttcattttttataattttgtcatattgcac
cagaattaataatatctctaatagatctgattagtagatacatggctatcgcaaaacaacatatacacatttaataaaaataatatt
tattaagaaaattcagatttcacgtacccatcaatataaataaaataatgattccttacaccgtacccatattaaggagattccacc
ttacccataaacaatataaatccagtaatatcatgtctgatgatgaacacaaatggtgtattaaattccagtttttcaggagatgat
ctcgccgtagctaccataatagtagatgcctctgctacagttccttgttcgtcgacatctatctttgcattctgaaacattttataa
atatataatgggtccctagtcatatgtttaaacgacgcattatctggattaaacatactaggagccatcatttcggctatcgactta
atatccctcttattttcgatagaaaatttagggagtttaagattgtacactttattccctaattgaaacgaccaatagtctaatttt
gcagccgtaatagaatctgtgaaatgggtcatattatcacctattgccaggtacatactaatattagcatccttatacggaaggcgt
accatatcatattcttcgtcatcgattgtgattgtatttccttgcaatttagtaactacgttcatcatgggaaccgttttcgtaccg
tacttattagtaaaactagcattgcgtgttttagtgatatcaaacggatattgccatatacctttaaaatatatagtattaatgatt
gcccatagagtattattgtcgagcatattagaatctactacattagacataccggatctacgttctactatagaattaattttatta
accgcatctcgtctaaagtttaatctatataggccgaatctatgatattgttgataatacgacggtttaatgcacacagtattatct
acgaaactttgataagttagatcagtgtacgtatatttagatgttttcagcttagctaatcctgatattaattctgtaaatgctgga
cccagatctctttttctcaaatccatagtcttcaataattctattctagtattacctgatgcaggcaatagcgacataaacatagaa
aacgaataaccaaacggtgagaagacaatattatcatcttgaatatttttatacgctactataccggcattggtaaatccttgcaga
cgataggtagacactgaacacgttaacgatagtatcaataacgcaatcatgattttatggtattaataattaaccttatttttatgt
tcggtataaaaattattgatgtctacacatccttttgtaattgacatctatatatccttttgtataatcaactctaatcactttaac
ttttacagttttccctaccagtttatccctatattcaacatatctatccatatgcatcttaacactctctgccaagatagcttcaaa
gtgaggatagtcaaaaagataaatatatagagcataatccttctcgtatactctgccctttattacatcacccgcattgggcaacga
ataacaaaatgcaagcatcttgttaacgggctcgtaaattgggataaaaattatgtttttatatctattttattcaagagaatattc
aggaatttctttttccggttgtatctcatcgcagtatatatcatttgtacattgtttcatattttttaatagtctacaccttttagt
aggactagtatcgtacaattcatagctgtattttgaattccaatcacgcataaaaatatcttccaattgttgacgaagacctaatcc
atcatccggtgtaatattaatagatgctccacatgtatccgtaaagtaatttcctgtccaatttgaggtacctatatacgccgtttt
atcggttaccatatatttggcatggtttaccctagaatacggaatgggaggatcagcatctggtacaataaatagctttacttctat
atttatgtttttagattttagcatagcgatagatcttaaaaagtttctcatgataaacgaagatcgttgccagcaactaatcaatag
cttaactgacacttgtctgtctatagcggctcttcttaattcatcttctatataaggccaaaacaaaatattgcctgccttcgaata
aataatagggataaagttcataacagatacataaacgaatttactcgcatttctgatacatgacaataaagcggttaaatcattggt
tctttccatagtacatagttgttgcggtgcagaagcaataaatacagagtgtggaacgccgcttacgttaatactaagaggatgatc
tgtattataatacgacggataaaagtttttccaattatatggtagattgttaactccaagataccagtatacctcaaaaatttgagt
gagatccgctgccaagttcctattattgaagatcgcaatacccaattctttgacctgagttagtgatctccaatccatgttagcgct
tcctaaataaatatgtgtattatcagatatccaaaattttgtatgaagaactcctcctaggatatttgtaatatctatgtatcgtac
ttcaactccggccatttgtagtctttcaacatcctttaatggtttgttagatttattgacggctactctaactcgtactcctctttt
gggtaattgtacaatcttgtttaatattatcgtgccgaaattcgtacccacttcatccgataaactccaataaaaagatgatatatc
tagtgtttttgtggtattggatagaatttccctccacatgttaaatgtagacaaatatactttatcaaattgcatacctataggaat
agtctctgtaatcactgcgattgtattatccggattcattttatttgttaaaagaataatcctatatcacttcactctattaaaaat
ccaagtttctatttctttcatgactgattttttaacttcatccgtttccttatgaagatgatgtttggcaccttcataaatttttat
ttctctattacaatttgcatgttgcatgaaataatatgcacctaaaacatcgctaatcttattgtttgttccctggagtatgagagt
cggggggtgttaatcttggaaattatttttctaaccttgttggtagccttcaagacctgactagcaaatccagccttaattttttca
tgattgattaatgggtcgtattggtatttataaactttatccatatctctagatactgattctggacatagctttccgactggcgca
tttagtgtgatggttcccataagtttggcagctagcagattcagttttgaaacagcatctgcattaactagaggagacattagaatc
attgctgtaaacaagtttggattatcgtaagaggctagctcccatggaatgacccaataagtagatttaatagttaccacgtgctgt
accaaagtcatcaatcatcattttttcaccattacttcttccatgtccaatatgatcatgtgagaatactaaaattcctaacgatga
tatgttttcagctagttcgtcataacgtccagaatgtttaccagctccatgacttatgaatactaatgccttaggatatgtaatagg
tttccaatatatgtaatcattgtccagattgaacatacagtttgcactcatgattcacgttatataactatcaatattaacagttcg
tttgatgatcatattatttttatgttttattgataattgtaaaaacatacaattaaatcaatatagaggaaggagacggctactgtc
ttttgtgagatagtcatggcgactaaattagattatgaggatgctgttttttactttgtggatgatgataaaatatgtagtcgcgac
tccatcatcgatctaatagatgaatatattacgtggagaaatcatgttatagtgtttaacaaagatattaccagttgtggaagactg
tacaaggaattgatgaagttcgatgatgtcgctatacggtactatggtattgataaaattaatgagattgtcgaagctatgagcgaa
ggagaccactacatcaattttacaaaagtccatgatcaggaaagtttattcgctaccataggaatatgtgctaaaatcactgaacat
tggggatacaaaaagatttcagaatctagattccaatcattgggaaacattacagatctgatgaccgacgataatataaacatcttg
atactttttctagaaaaaaaattgaattgatgatataggggtcttcataacgcataattattacgttagcattctatatccgtgtta
aaaaaaattatcctatcatgtatttgagagttttatatgtagcaaacatgatagctgtgatgccaataagctttagatattcacgcg
tgctagtgttagggatggtattatctggtggtgaaatgtccgttatataatctacaaaataatcatcgcatatagtatgcgatagta
gagtaaacatttttatcgtttctactgggttcatacatcgtctacccaattcggttataaatgaaattgtcgccaatcttacaccca
accccttgttatccattagtatagtattaacttcgttatttatgtcataaactgtaaatgattttgtagatgccatatcatacatga
tattcatgtccctattataatcattactaactttatcacaatatatgttgataatatctatatatgatctagtctttgtgggcaact
gtctatacaagtcgtctaaacgttgtttactcatatagtatcgaacagccatcattacatggtcccgttccgttgatagataatcga
gtatgttagtggacttgtcaaatctatataccatattttctggaagtggatatacatagtcgtgatcaacattattgctagcctcat
cttctatatcctgtactataccattatctatatcatctacataatctacgatattattacacataaacatcgacaacatactattgt
ttattatctaagtcctgttgatccaaacccttgatctcctctatttgtactatctagagattgtacttcttccagttctggataata
tatacgttgatagattagctgagctattctatctccagtatttacattaaacgtacattttccattattaataagaatgactcctat
gtttcccctataatcttcgtctattacaccgcctcctatatcaatgccttttagggacagaccagacctaggagctattctaccata
gcagaacttaggcatggacatactaatatctgtcttaattaactgtcgttctcctggagggatagtataatcgtaagcgctatataa
atcatatccggcggcgtaaggtgattgcctagtaggagatttagctctgttagtttccttaacaaatctaactggtgagttaatatt
catgttgaacataaaactaatattttatttcaaaattatttaccatcccatatattccatgaataagtgtgatgattgtacacttct
atagtatctatatacgattcacgataaaatcctcctatcaatagcagtttattatccactatgatcaattctggattatccctcgga
taaataggatcatctatcagagtccatgtattgctggattcacaataaaattccgcatttctaccaaccaagaataaccttctaccg
aacactaacgcgcatgatttataatgaggataataagtggatggtccaaactgccactgatcatgattgggtagcaaatattctgta
gttgtatcagtttcagaatgtcctcccattacgtatataacattgtttatggatgccactgctggattacatctaggtttcagaaga
ctcggcatattaacccaagcagcatccccgtggaaccaacgctcaacagatgtgggatttggtagacctcctactacgtataattta
ttgttagcgggtatcccgctagcatacagtctggggctattcatcggaggaattggaatccaattgtttgatatataatttaccgct
atagcattgttatgtatttcattgttcatccatccaccgatgagatatactacttctccaacatgagtacttgtacacatatggaat
atatctataatttgatccatgttcataggatactctatgaatggatacttgtatgatttgcgtggttgtttatcacaatgaaatatt
ttggtacagtctagtatccattttacattatttatacctctgggagaaagataatttgacctgattacatttttgataaggagtagc
agatttcctaatttatttcttcgctttatataccacttaatgacaaaatcaactacataatcctcatctggaacatttagttcatcg
ctttctagaataagtttcatagatagataatcaaaattgtctatgatgtcatcttccagttccaaaaagtgtttggcaataaagttt
ttagtatgacataagagattggatagtccgtattctatacccatcatgtaacactcgacacaatattcctttctaaaatctcgtaag
ataaagtttatacaagtgtagatgataaattctacagaggttaatatagaagcacgtaataaattgacgacgttatgactatctata
tatacctttccagtatacgagtaaataactatagaagttaaactgtgaatgtcaaggtctagacaaacccttgtaactggatcttta
tttttcgtgtatttttgacgtaaatgtgtgcgaaagtaaggagataactttttcaatatcgtagaattgactattatattgccacct
atagcatcaataattgttttgaatttcttagtcatagacaatgctaatatattcttacagtacacagtattaacaaatatcggcatt
tatgtttctttaaaagtcaacatctaaagaaaaatgattatcttcttgagacataactcccattttttggtattcacccacacgttt
ttcgaaaaaattagtttttccttccaatgatatattttccatgaaatcaaacggattggtaacattataaatttttttaaatcccaa
ttcagaaatcaatctatccgcgacgaattctatatatgttttcatcatttcacaattcattcctataagtttaactggaagagccgc
agtaagaaattcttgttcaatggataccgcatctgttataatagatctaacggtttcttcactcggtggatgcaataaatgtttaaa
catcaaacatgcgaaatcgcagtgcagaccctcgtctctactaattagttcgttggaaaacgtgagtccgggcattaggccacgctt
tttaagccaaaatatggaagcgaatgatccagaaaagaagattccttctactgcagcaaaggcaataagtctctctccataaccggc
gctgtcatgtatccacttttgagcccaatcggccttcttttttacacaaggcatcgtttctatggcattaaagagatagtttttttc
attactatctttaacataagtatcgatcaaaagactatacatttccgaatgaatgttttcaatggccatctgaaatccgtagaaaca
tctagcctcggtaatctgtacttctgtacaaaatcgttccgccaaattttcattcactattccgtcactggctgcaaaaaacgccaa
tacatgttttataaaatatttttcgtctggtgttagtttattccaatcattgatatctttagatatatctacttcttccactgtcca
aaatgatgcctctgcctttttatacatgttccagatgtcataatattggattgggaaaataacaaatctatttggatttggtgcaag
gatgggttccataactaaattaacaataacaataaattttttttcagttatctatatgcctgtacttggatcttttgtacatcgata
tcgccgcaatcactacaataattacaagtattattgatagcattgttattagtactatcataattaaattatcgacattcatgggtg
ctgaataatcgttattatcatcattatcattttgtaattgtgacatcatactagataaatcgtttgcgagattgttgtgggaagcgg
gcatggaggatgaattatcgttattattatttaacgcctcccattcggattcacaaatgttacgcacattcaacattttatggaaac
tataattttgtgaaaacagataacaagaaaactcgtcatcgttcaaatttttaacgatagtaaaccgattaaacgtcgagctaattt
ctaacgctagcgactctgttggatatgggtttccagatatatatcttttcagttcccctacgtatctataatcatctgtaggaaatg
gaagatatttccatttatctactgttcctaatatcatatgtggtggtgtagtagaaccattaagcgcgaaagatgttatttcgcatc
gtattttaacttcgcaataatttctggttagataacgcactctaccagtcaagtcaatgatattagcctttacagatatattcatag
tagttgtaacgatgactccatcttttagatgcgatactcctttgtatgtaccagaatcttcgtaccgcaaactcgatatatttaaac
aagttaatgagatattaacgcgttttatgaatgatgatatataaccagaagttttatcctcggtggctagcgctataaccttatcat
tataataccaactagtgtgattaatatgtgacacgttagtgtgggtacaaatatgtacattatcgtctacgtcgtattcgatacatc
cgcatacagccaacaaatataaaatgacaaatactctaacgccgttcgtacccatcttgatgcggtttaataaatgttttgatttca
atttattgtaaaaaaagattcggttttatactgttcgatattctcattgcttatattttcatctatcatctccacacagtcaaatcc
gtggttagcatgcacctcatcaaccggtaaaagactatcggactcttctatcattataactctagaatatttaatttggtcattatt
aatcaagtcaattatcttatttttaacaaacgtgagtattttactcattttttataaaaacttttagaaatatacagactctatcgt
gtgtctatatcttctttttatatccaatgtatttatgtctgatttttcttcatttatcatatataatggtccaaattctacacgtgc
ttcggattcatccagatcattaaggttcttataattgtaacatccttctcttccctcttctacatcttccttcttattcttattctt
agcgtcacagaatctaccacagcaggatcccatgacgagcgtcatattaaactaatccattttcaattataatatacgattagtaat
gaccattaaaataaaaaatattcttcataaccggcaagaaagtgaaaagttcacattgaaactatgtcagtagtatacatcatgaaa
tgatgatatatatatactctattttggtggaggattatatgatataattcgtggataatcattcttaagacacatttcttcattcgt
aaatcttttcacgttaaatgagtgtccatattttgcaatttcttcatatgatggcggtgtacgtggacgaagctgctcctgttcttg
ttgtagtcgccgactgtcgtgtttgcgtttagatccctccattatcgcgattgcgtagatggagtactattatataccttgtaatta
aatttttttattaattaaacgtataaaaacgttccgtatctgtatttaagagccagatttcgtctaatagaacaaatagctacagta
aaaataactagaataattgctacacccactagaaaccacggatcgtaatacggcaatcggttttcgataataggtggaacgtatatt
ttatttaaggacttaacaattgtctgtaaaccacaatttgcttccgcggatcctgtattaactatctgtaaaagcatatgttgaccg
ggcggagccgaacattctccgatatctaatttctgtatatctataatattattaacctccgcatacgcattacagttcttttctagc
ttggataccgcactaggtacatcgtctagatctattcctatttcttcagcgatagctcttctatccttttccggaagcaatgaaatc
acttcaataaatgattcaaccatgagtgtgaaactaagtcgagaattactcatgcatttgttagttattcggagcgcgcaattttta
aactgtcctataacctctcctatatgaatagcacaagtgacattagtagggatagaatgttgagctaatttttgtaaataactatct
ataaaaagattatacaaagttttaaactctttagtttccgccatttatccagtctgagaaaatgtctctcataataaatttttccaa
gaaactaattgggtgaagaatggaaacctttaatctatatttatcacagtctgttttggtacacatgatgaattcttctaatgctgt
actaaattcgatatctttttcgatttctggatatgtttttaataaagtatgaacaaagaaatggaaatcgtaataccagttatgttc
aactttgaaattgttttttattttcttgttaatgattccagccacttgggaaaagtcaaagtcgtttaatgccgatttaatacgttc
attaaaaacaaactttttatcctttagatgaattattattggttcattggaatcaaaaagtaagatattatcgggtttaagatctgc
gtgtaaaaagttgtcgcaacagggtagttcgtagattttaatgtataacagagccatctgtaaaaagataaactttatgtattgtac
caaagatttaaatcctaatttgatagctaactcggtatctactttatctgccgaatacagtgctaggggaaaaattataatatttcc
tctttcgtattcgtagttagttctcttttcatgttcgaaaaagtgaaacatgcggttaaaatagtttataacattaatattactgtt
aataactgccggataaaagtgggatagtaatttcacgaatttgatactgtcctttctctcgttaaacgcctttaaaaaaactttaga
agaatatctcaatgagagttcctgaccatccatagtttgtatcaataatagcaacatatgaagaacccgtttatacagagtatgtaa
aaatgttaatttatagtttaatcccatggcccacgcacacacgattaattttttttcatctccctttagattgttgtatagaaattt
gggtactgtgaactccgccgtagtttccatgggactatataattttgtggcctcgaatacaaattttactacatagttatctatctt
aaagactataccatatcctcctgtagatatgtgataaaaatcgtcgtttataggataaaatcgtttatccttttgttggaaaaagga
tgaattaatgtaatcattctcttctatctttagtagtgtttccttattaaaattcttaaaataatttaacaatctaactgacggagc
ccaattttggtgtaaatctaattgggacattatgttgttaaaatacaaacagtctcctaatataacagtatctgataatctatgggg
agacatccattgatattcaggggatgaatcattggcaacacccatttattgtacaaaaagccccaatttacaaacgaaagtccaggt
ttgatagagacaaacaattaactattttgtctctgtttttaatttctttggtaatgaaattattcacaatatcagtatcttctttat
ctaccagagattttactaacttgataaccttggctgtctcattcaatagggtagtaatatttgtatgtgtgatattgatatcttttt
gaattgtttcttttagaagtgattctttgatggtgccagcatacgaattacaataatgcagaaactcagttaacatgcaggaattat
agtaagccaattccaattgttgcctgtattgtattagagtattaatatgcgcaatggtgtccttgcgtttctctgatagaatgcgag
cagcgattttggcgttatcatttgacgatatttctggaatgacgaatcctgtttctactaactttttggtaggacaaagtgaaacaa
tcaagaagatagcttctcctcctatttgtggaagaaattgaactcctctagatgatctactgacgatagtatctccttgacagatat
tggaccgaattacagaagtacctggaatgtaaagccctgaaaccccctcattttttaagcagattgttgccgtaaatcctgcactgt
gaccaagatagagagctcctttggtgaatccatctctatgtttcagtttaaccaagaaacagtcagctggtctaaaatttccatctc
tatctaatacagcatctaacttgatgtcaggaactatgaccggtttaatgttatatgtaacattgagtaaatccttaagttcataat
catcactgtcatcagttatgtacgatccaaacaatgtttctactggcatagtggatacgaagatgctatccatcagaatgtttccct
gattagtattttctatatagctattcttctttaaacgattttccaaatcagtaactatgttcatttttttaggagtaggacgcctag
ccagtatggaagaggattttctagatcctctcttcaacatctttgatctcgatggaatgcaaaaccccatagtgaaacaaccaacga
taaaaataatattgtttttcactttttataattttaccatctgactcatggattcattaatatctttataagagctactaacgtata
attctttataactgaactgagatatatacaccggatctatggtttccataattgagtaaatgaatgctcggcaataactaatggcaa
atgtatagaacaacgaaattatactagagttgttaaagttaatattttctatgagctgttccaataaattatttgttgtaactgcgt
tcaagtcataaatcatcttgatactatccagtaaaccgtgtttaagttctggaatattatcatcccattgtaaagcccctaattcga
ctatcgaatatcctgctctgatagcagtttcaatatcgacggacgtcaatactgtaataaaggtggtagtattgtcatcatcgtgat
aaactacgggaatatggtcgttagtaggtacggtgactttacacaacgcgatatataactttccttttgtaccatttttaacgtagt
tgggacgtcctgcagggtattgttttgaagaaatgatatcgagaacagatttgatacgatatttgttggattcctgattattcacta
taatataatctagacagatagatgattcgataaatagagaaggtatatcgttggtaggataatacatccccattccagtattctcgg
atactctattgatgacactagttaagaacatgtcttctattctagaaaacgaaaacatcctacatggactcattaaaacttctaacg
ctcctgattgtgtctcgaatgcctcgtacaaggatttcaaggatgccatagattctttgaccaacgatttagaattgcgtttagcat
ctgatttttttattaaatcgaatggtcggctctctggtttgctaccccaatgataacaatagtcttgtaaagataaaccgcaagaaa
atttatacgcatccatccaaataaccctagcaccatcggatgatattaatgtattattatagattttccatccacaattattgggcc
agtatactgttagcaacggtatatcgaatagattactcatgtaacctactagaatgatagttcgtgtactagtcataatatctttaa
tccaatctaagaaatttaaaattagattttttacactgttaaagttaacaaaggtattacccggatacgtggatatcatatatggca
ttggtccattatcagtaatagctccataaactgatacggcgatggtttttatatgtgtttgatctaacgaggaagaaattcgcgccc
acaattcatctctagatatgtatttaatatcaaacggtaacacatcaatttcgggacgcgtatatgtttctaaatttttaatccaaa
tataatgatgacctatatgccctattatcatactgtcaactatagtacacctagagaacttacgatacatctgtttcctataatcgt
taaattttacaaatctataacatgctaaaccttttgacgacagccattcattaatttctgatatggaatctgtattctcgataccgt
attgttctaaagccagtgctatatctccctgttcgtgggaacgctttcgtataatatcgatcaacggataatctgaagtttttggag
aataatatgactcatgatctatttcgtccataaacaatctagacataggaattggaggcgatgatcttaattttgtgcaatgagtcg
tcaatcctataacttctaatcttgtaatattcatcatcgacataatactatctatgttatcatcgtatattagtataccacggcctt
cttcatttcgtgccaaaataatatacagtcttaaataattacgcaatatctcaatagtttcataattgttagctgttttcatcaaga
tttgtaccctgtttaacatgatggcgttctatacgtctctattttcttttttttaaatttttaacgatttactgtggctagataccc
aatctctctcaaatatttttttagcctcgcttacaagctgtttatctatactattaaaactgacgaatccgtgattttggtaatggg
ttccgtcgaaatttgccgaagtgatatgaacatattcgtcgtcgactatcaacaattttgtattattctgaatagtgaaaaccttca
cagatagatcattttgaacacacaacgcgtctagacttctggcggttgccatagaatatacgtcgttcttatcccaattaccaacta
gaagtctgatcttaactcctctattaatggctgcttctataatggagttgtaaatgtcgggccaatagtagctattaccgtcgacac
gtgtagtgggaactatggccaaatgttcaatatctatactagtcttagccgacttgagtttatcaataactacatcggtatctagat
ctctagaatatcccaataggtgttccggagaatcagtaaagaacactccacctataggattcttaatatgatacgcagtgctaactg
gcaaacaacaagccgcagagcataaattcaaccatgaattttttgcgctattaaaggctttaaaagtatcaaatcttctacgaagat
ctgtggccagcgggggataatcagaatatacacctaacgttttaatcgtatgtatagatcctccagtaaatgacgcgtttcctacat
aacatctttcatcatctgacacccaaaaacaaccgagtagtagtcccacattattttttttatctatattaacggttataaaattta
tatccgggcagtgactttgtagctctcccagatttcttttccctcgttcatctagcaaaactattattttaatccctttttcagatg
cctcttttagtttatcaaaaataagcgctcccctagtcgtactcagaggattacaacaaaaagatgctatgtatatatatttcttag
ctagagtgataatttcgttaaaacattcaaatgttgttaaatgatcggatctaaaatccatattttctggtagtgtttctaccagcc
tacattttgctcccgcaggtaccgatgcaaatggccacatttagttaacataaaaacttatacatcctgttctatcaacgattctag
aatatcatcggctatatcgctaaaattttcatcaaagtcgacatcacaacctaactcagtcaatatattaagaagttccatgatgtc
atcttcgtctatttctatatccgtatccattgtagattgttgaccgattatcgagtttaaatcattactaatactcaatccttcaga
atacaatctgtgtttcattgtaaatttataggcggtgtatttaagttggtagattttcaattatgtatcaatatagcaacagtagtt
cttgctcctccttgattctagcatcctcttcattattttcttctacgtacataagcatgtccaatacgttagacaacacaccgacga
tggcggccgccacagacacgaatatgactagaccgatgaccatttaaaaacccctctctagctttcacttaaactgtatcgattatt
cttttagaacatgtataatataaaaacattattctatttcgaatttaggcttccaaaaatttttcatccgtaaaccgataataatat
atatagacttgttaatagtcggaataaatagattaatgcttaaactatcatcatctccacgattagagatacaatatttacattttt
tttgctgtttcgaaactttatcaatacacgttaatacaaacccaggaaggagatattgaaactgaggctgttgaaaatgaaacggtg
aatacaataattcagataatgtaaaatcatgattccgtattctgatgatattagaactgctaatggatgtcgatggtatgtatctag
gagtatctattttaacaaagcatcgatttgctaatatacaattatccttttgattaattgttattttattcatattcttaaaaggtt
tcatatttatcaattcttctacattaaaaatttccatttttaatttatgtagcccccgcaatactcctcattacgtttcattttttg
tctataatatccattttgttcatctcggtacatagattatccaattgagaagcgcatttagtagttttgtacattttaagtttattg
acgaatcgtcgaaaactagttatagttaacattttattatttgataccctgatattaatacccctgccgttactattatttataact
gatgtaatccacgtaacattagaattaattatcgatagtaatgcatcgacgcttccaaaattgtctattataaactcaccgataatt
tttttattgcatgttttcatattcattaggattatcaaatctttaatcttactacgattgtatgcgttgatattgcaagacgtcatt
ctaaaagacggaggatctccatcaaatgccagacaatcacgtacaaagtacatggaaataggttttgttctattgcgcatcatagat
ttatatagaacacccgtagaaatactaatttgttttactctataaaatactaatgcatctatttcatcgttttgtataacgtctttc
caagtgtcaaattccaaatttttttcattgatagtaccaaattcttctatctctttaactacttgcatagataggtaattacagtga
tgcctacatgccgttttttgaaactgaatagatgcgtctagaagcgatgctacgctagtcacaatcaccactttcatatttagaata
tatgtatgtaaaaatatagtagaatttcattttgtttttttctatgctataaatgaattctcattttgcatctgctcatactccgtt
ttatatcaataccaaagaaggaagatatctggttctaaaagccgttaaagtatgcgatgttagaactgtagaatgcgaaggaagtaa
agcttcctgcgtactcaaagtagataaaccctcatcgcccgcgtgtgagagaagaccttcgtccccgtccagatgcgagagaatgaa
taaccctggaaaacaagttccgtttatgaggacggacatgctacaaaatatgttcgcggctaatcgcgacaacgtggcgtcgagact
tttgaactaaaatacaattatatccttttcgatattaataaatccgtgtcgtccaggttttttatctctttcagtatgtgaatagat
aggtattttatctctattcatcatcgaatttaagagatccgataaacattgtttgtattctccagatgtcagcatctgatacaacaa
tatatgtgcacataaacctctggcacttatttcatgtaccttccccttatcactaaggagaatagtatttgagaaatatgtatacat
gatattatcatgaattagatatacagaatttgtaacactctcgaaatcacacgatgtgtcggcgttaagatctaatatatcactcga
taacacattttcatctagatacactagacattttttaaagctaaaatagtctttagtagtgacagtaactatgcgattattttcatc
gatgatacatttcatcggcatattattacgcttaccatcaaagactataccatgtgtatatctaacgtattctagcatggttgccat
acgcgcattaaacttttcaggatctttggatagatcttccaatctatctatttgagaaaacatttttatcatgttcaatagttgaaa
cgtcggatccactatatagatattatctataaagattttaggaactacgttcatggtatcctggcgaatattaaaactatcaatgat
atgattatcgttttcatcttttatcaccatatagtttctaagatatgggattttacttaatataatattatttcccgtgataaattt
tattagaaaggccaaatctataagaaaagttctagaattagtctgaagaatatctatatcgccgtaccgtatatttggattaattag
atatagagaatatgatccgtaacatatacaacttttattatggcgtctaagatattcttccatcaacttattaacatttttgactag
ggaagatacattatgacgtcccattacttttgccttgtctattactgcgacgttcatagaatttagcatatctcttgccaattcttc
cattgatgttacattataagaaattttagatgaaattacatttggagctttaatagtaagaactcctaatatgtccgtgtatgtggt
cactaatacagattgtagttctataatcgtaaataatttacctatattatatgtttgagtctgtttagaaaagtagctaagtatacg
atcttttatttctgatgcagatgtattaacatcggaaaaaaatctttttttattcttttttactaaagatacaaatatgtctttgtt
aaaaacagttattttttgaatatttctagcttgtaattttaacatatgatattcgttcacactaggtactctgcctaaataggtttc
tataatctttaatgtaatattaggaagagtattctgatcaggattcctattcattttgaggatttaaaactctgattattgtctaat
atggtctctacgcaaactttttcacagagcgatagagtttttgataactcgtttttcttaagaaatataaaactactgtctccagag
ctcgctctatcttttattttatttaattcgatacaaactcctgatactggttcagaaagtaattcattaattttcagtcctttatag
aagatatttaatatagataatacaaaattttcagttcttgatatcgatctgattgatcctagaactagatatattaataacgtgctc
attaggcagtttatggcagcttgataattagatatagtatattccagttcatatttattagataccgcattgcccagattttgatat
tctatgaattcctctgaaaataaatccaaaataactaaacattctattttttgtggattagtgtactctcttccctctatcatgttc
actactggtgtccacgatgataaatatctagagggaatataatatagtccataggatgccaatctagcaatgtcgaataactgtaat
ttgattcttcgttcttcattatgaattgattcttgaggtataaacctaacacaaattatattattagacttttcgtatgtaatgtct
ttcatgttataagtttttaatcctggaatagaatctattttaatgaggcttttaaacgcagagttctccaacgagtcaaagcataat
actctgttgtttttcttatatacgatgttacgattttcttctttgaatggaataggtttttgaattagtttataattacaacataat
agataaggaagtgtgcaaatagtacgcggaaaaaacataatagctcccctgttttcatccatggttttaagtaaatgatcactggct
tctttagtcaatggatattcgaacattaaccgtttcatcatcattggacagaatccatatttcttaatgtaaagagtgatcaaatca
ttgtgtttattgtaccatcttgttgtaaatgtgtattcggttatcggatctgctcctttttctattaaagtatcgatgtcgatctcg
tctaagaattcaactatatcgacatatttcatttgtatacacataaccattactaacgtagaatgtataggaagagatgtaacggga
acagggtttgttgattcgcaaactattctaatacataattcttctgttaatacgtcttgcacgtaatctattatagatgccaagata
tctatataattattttgtaagatgatgttaactatgtgatctatataagtagtgtaataattcatgtatttcgatatatgttccaac
tctgtctttgtgatgtctagtttcgtaatatctatagcatcctcaaaaaatatattcgcatatattcccaagtcttcagttctatct
tctaaaaaatcttcaacgtatggaatataataatctattttacctcttctgatatcattaatgatatagtttttgacactatcttct
gtcaattgattcttattcactatatctaagaaacggatagcgtccctaggacgaactactgccattaatatctctattatagcttct
ggacataattcatctattataccagaattaatgggaactattccgtatctatctaacatagttttaagaaagtcagaatctaagacc
tgatgttcatatattggttcatacatgaaatgatctctattgatgatagtgactatttcattctctgaaaattggtaactcattcta
tatatgctttccttgttgatgaaggatagaatatactcaatagaatttgtaccaacaaactgttctcttatgaatcgtatatcatca
tctgaaataatcatgtaaggcatacatttaacaattagagacttgtctcctgttatcaatatactattcttgtgataatttatgtgt
gaggcaaatttgtccacgttctttaattttgttatagtagatatcaaatccaatggagctacagttcttggcttaaacagatatagt
ttttctggaacgaattctacaacattattataaaggactttgggtagataagtgggatgaaatcctattttaattaatgcgatagcc
ttgtcctcgtgcagatatccaaacgcttttgtgatagtatggcattcattgtctagaaacgctctacgaatatctgtgacagatatc
atctttagagaatatactagtcgcgttaatagtactacaatttgtattttttaatctatctcaataaaaaaattaatatgtatgatt
caatgtataactaaactactaactgttattgataactagaatcagaatctaatgatgacgtaaccaagaagtttatctactgccaat
ttagctgcattatttttagcatctcgtttagattttccatctgccttatcgaatactcttccgtcgatgtctacacaggcataaaat
gtaggagagttactaggccccactgattcaatacgaaaagaccaatctctcctagtaatttggcagtactcattaataacggtgaca
gggttagcacctttccaatcaataatttttttagccggaataacatcatcaaaagacttatgatcctctctcattgatttttcgcgg
gatacatcatctattatgacgtcagccatagcatcagcatccggcttatccgcctccgttgtcataaaccaacgaggaggaatatcg
tcggagctgtacaccatagcactacgttgaagatcgtacagagctttattaacttctcgcttctccatattaagttgtctagttagt
tgtgcagcagtagctccttcgattccaatggttttaatagcctcacacacaatctctgcgttagaacgctcgtcgatatagatttta
gacatttttagagagaactaacgcaatcagtaataaaactaatttattttatcattttttttattcatcatcctctggtggttcgtc
gtttctatcgaatgtagctctgattaacccgtcatctataggtgatgctggttctggagattctggaggagatggattattatctgg
aagaatctctgttatttccttgttttcatgtatcgattgcgttgtaacattaagattgcgaaatgctctaaatttgggaggcttaaa
gtgttgtttgcaatctctacacgcgtgtctaactagtggaggttcgtcagcggctctagtttgaatcatcatcggcgtagtattcct
acttttacagttaggacacggtgtattgtatttctcgtcgagaacgttaaaataatcgttgtaactcacatcctttattttatctat
attgtattctactcctttcttaatgcattttataccgaataagagatagcgaaggaattctttttcggtgccgctagtacccttaat
catatcacatagtgttttatattccaaatttgtggcaatagacggtttatttctatacgatagtttgtttctggaatcctttgagta
ttctataccaatattattctttgattcgaatttagtttcttcgatattagattttgtattacctatattcttgatgtagtactttga
tgatttttccatggcccattctattaagtcttccaagttggcatcatccacatattgtgatagtaattctcggatatcagtagcggt
taccgccattgatgtttgttcattggatgagtaactactaatgtatacattttccatttataacacttatgtattaactttgttcat
ttatattttttcattattatgttgatattaacaaaagtgaatatatatatgttaataattgtattgtggttatacggctacaatttt
ataattagtgaaagtcagtgtccgatgatcaatgacgatagctttactctgaaaagaaagtatcaaatcgatagtgcggagtcaaca
ataaaaatggataagaagaggacaaagtttcagaatagagccaaaatggtaaaagaaataaatcagacaataagagcagcacaaact
cattacgagacattgaaactaggatacataaaatttaagagaatgattaggactactactctagaagatatagcaccatctattcca
aataatcagaaaacttataaactattctcggacatttcagccatcggcaaagcatcacggaatccaagtaagatggtatatgctctg
ctgctttacatgtttcccaatttgtttggagatgatcatagattcattcgttatagaatgcatccaatgagtaaaatcaaacacaag
atcttctctcctttcaaacttaatcttattagaatattagtggaagaaagattctataataatgaatgcagatctaataaatggaga
ataattggaacacaagttgataaaatgttgatagctgaatctgataaatatacaatagatgcaaggtataacctaaaacccatgtat
agaatcaagggaaaatctgaagaagataccctctttatcaaacagatggtagaacaatgtgtgacatcccaggaattggtggaaaaa
gtgttgaagatactgtttagagatttgttcaagagtggagaatacaaagcgtacagatacgatgatgatgtagaaaatggatttatt
ggattggatacactaaaattaaacattgttcatgatatagttgaaccatgtatgcctgttcgtaggccagtggctaagatactgtgt
aaagaaatggtaaataaatactttgagaatccgctacatattattggtaaaaatcttcaagagtgcattgactttgttagtgaatag
gcatttcatctttctccaatactaattcaaattgttaaattaataatggatagtataaatagttattagtgataaaatagtaaaaat
aattattagaataagagtgtagtatcatagataactctcttctataaaaatggattttattcgtagaaagtatcttatatacacagt
agaaaataatatagattttttaaaggatgatacattaagtaaagtaaacaattttaccctcaatcatgtactagctctcaagtatct
agttagcaattttcctcaacatgttattactaaggatgtattagctaataccaatttttttgttttcatacatatggtacgatgttg
taaagtgtacgaagcggttttacgacacgcatttgatgcacccacgttgtacgttaaagcattgactaagaattatttatcgtttag
taacacaatacaatcgtacaaggaaaccgtgcataaactaacacaagatgaaaaatttttagaggttgccaaatacatggacgaatt
aggagaacttataggcgtaaattatgacttagttcttaatccattatttcacggaggggaacccatcaaagatatggaaatcatttt
tttaaaactgtttaagaaaacagacttcaaagttgttaaaaaattaagtgttataagattacttatttgggcttacctaagcaagaa
agatacaggcatagagtttgcggataatgatagacaagatatatatactctatttcaacaaactggtagaatcgtccatagcaatct
aacagaaacgtttagagattatatctttcccggagataagactagctattgggtgtggttaaacgaaagtatagctaatgatgcgga
tattgttcttaatagacacgccattaccatgtatgataaaattcttagttatatatactctgagataaaacaaggacgcgttaataa
aaacatgcttaagttagtttatatctttgagcctgaaaaagatatcagagaacttctgctagaaatcatatatgatattcctggaga
tatcctatctattattgatgcaaaaaacgacgattggaaaaaatattttattagtttttataaagctaattttattaacggtaatac
atttattagtgatagaacgtttaacgaggacttattcagagttgttgttcaaatagatcccgaatatttcgataatgaacgaattat
gtctttattctctacgagtgctgcggacattaaacgatttgatgagttagatattaataacagttatatatctaatataatttatga
ggtgaacgatatcacattagatacaatggatgatatgaagaagtgtcaaatctttaacgaggatacgtcgtattatgttaaggaata
caatacatacctgtttttgcacgagtcggatcccatggtcatagagaacggaatactaaagaaactgtcatctataaaatccaagag
tagacggctgaacttgtttagcaaaaacattttaaaatattatttagacggacaattggctcgtctaggtcttgtgttagatgatta
taaaggagacttgttagttaaaatgataaaccatcttaagtctgtggaggatgtatccgcattcgttcgattttctacagataaaaa
ccctagtattcttccatcgctaatcaaaactattttagctagttataatatttccatcatcgtcttatttcaaaggtttttaagaga
taatctatatcatgtagaagaattcttggataaaagcatccatctaaccaagacggataagaaatatatacttcaattgataagaca
cggtagatcatagaacagaccaaatatattattaataatttgtatatacatagatataattatcacatattaaaaattcacacattt
ttgataaatgggaactgctgcaacaattcagactcccaccaaattaatgaataaagaaaatgcagaaatgattttggaaaaaattgt
tgatcatatagttatgtatattagtgacgaatcaagtgattcagaaaataatcctgaatatattgattttcgtaacagatacgaaga
ctatagatctctcattataaaaagtgatcacgagtttgtaaagctatgtaaaaatcatgcagagaaaagttctccagaaacgcaaca
aatgattatcaaacacatatacgaacaatatcttattccagtatctgaagtactattaaaacctataatgtccatgggtgacataat
tacatataacggatgtaaagacaatgaatggatgctagaacaactctctaccctaaactttaacaatctccgcacatggaactcatg
tagcataggcaatgtaacgcgtctgttttatacattttttagttatctgatgaaagataaactaaatatataagtataatcccattc
taatactttaacctgatgtattagcatcttattagaatattaacctaactaaaagacataacataaaaactcattacatagttgata
aaaagcggtaggatataaatattatggctgccaccgttccgcgttttgacgacgtgtacaaaaatgcacaaagaagaattctagatc
aagaaacattttttagtagaggtctaagtagaccgttaatgaaaaacacatatctatttgataattacgcgtatggatggataccag
aaactgcaatttggagtagtagatacgcaaacttagatgcaagtgactattatcccatttcgttgggattacttaaaaagttcgagt
ttctcatgtctctatataaaggtcctattccagtatacgaagaaaaagtaaatactgaattcattgctaatggatcgttctctggta
gatacgtatcatatcttcgaaagttttctgctcttccaacaaacgagtttattagttttttgttactgacttccattccaatctata
atatcttgttctggtttaaaaatactcagtttgatattactaaacacacattattcagatacgtctatacagataatgccaaacacc
tggcgttggctaggtatatgcatcaaacaggagactataagcctttgtttagtcgtctcaaagagaattatatatttaccggtcccg
ttccaataggtatcaaagatataaatcaccctaatcttagtagagcaagaagtccatccgattatgagacattagctaatattagta
ctatattgtactttaccaagtatgatccggtattaatgtttttattgttttacgtacctgggtattcaattactacaaaaattactc
cagccgtagaatatctaatggataaactgaatctaacaaagagcgacgtacaactgttgtaaattattttatgcttcgtaaaatgta
ggttttgaaccaaacattctttcaaagaatgagatgcataaaactttattatccaatagattgactatttcggacgtcaatcgttta
aagtaaacttcgtaaaatattctttgatcactgccgagtttaaaacttctatcgataattgtttcatatgttttaatatttacaagt
tttttggtccatggtacattagccggacaaatatatgcaaaataatatcgttctccaagttctatagtttctggattatttttatta
tattcagtaaccaaatacatattagggttatctgcggatttataatttgagtgatgcattcgactcaacataaataattctagagga
gacgatctactatcaaattcggatcgtaaatctgtttctaaagaacggagaatatctatacatacctgattagaattcatccgtcct
tcagacaacatctcagacagtctggtcttgtatgtcttaatcatattcttatgaaacttggaaacatctcttctagtttcactagta
cctttattaattctctcaggtacagattttgaattcgacgatgccgagtatttcatcgttgtatatttcttcttcgattgcataatc
agattcttatataccgcctcaaactctattttaaaattattaaacaatactctattattaatcagtcgttctaactcctttgctatt
tctatggacttatctacatcttgactgtctatctctgtaaacacggagtcggtatctccatacacgctacgaaaacgaaatctgtaa
tctataggcaacgatgttttcacaatcggattaatatctctatcgtccatataaaatggattacttaatggattggcaaaccgtaac
ataccgttagataactctgctccatttagtaccgattctagatacaagatcattctacgtcctatggatgtgcaactcttagccgaa
gcgtatgagtatagagcactatttctaaatcccatcagaccatatactgagttggctactatcttgtacgtatattgcatggaatca
tagatggccttttcagttgaactggtagcctgttttaacatctttttatatctggctctctctgccaaaaatgttcttaatagtcta
ggaatggttccttctatcgatctatcgaaaattgctatttcagagatgaggttcggtagtctaggttcacaatgaaccgtaatatat
ctaggaggtggatatttctgaagcaagagctgattatttatttcttcttccaatctattggtactaacaacgacaccgactaatgtt
tccggagatagatttccaaagatacacacattaggatacagactgttataatcaaagattaatacattattactaaacattttttgt
tttggagcaaataccttaccgccttcataaggaaacttttgttttgtttctgatctaactaagatagttttagtttccaacaatagc
tttaacagtggacccttgatgactgtactcgctctatattcgaataccatggattgaggaagcacatatgttgacgcacccgcgtct
gtttttgtttctactccataatactcccacaaatactgacacaaacaagcatcatgaatacagtatctagccatatctaaagctatg
tttagattataatccttatacatctgagctaaatcaacgtcatcctttccgaaagataatttatatgtatcattaggtaaagtagga
cataatagtacgactttaaatccattttcccaaatatctttacgaattactttacatataatatcctcatcaacagtcacataatta
cctgtggttaaaacctttgcaaatgcagcggctttgcctttcgcgtccgtagtatcgtcaccgatgaacgtcatttctctaactcct
ctatttaatactttacccatgcaactgaacgcgttcttggatatagaatccaatttgtacgaatccaatttttcagatttttgaatg
aatgaatatagatcgaaaaatatagttccattattgttattaacgtgaaacgtagtattggccatgccgcctactcccttatgacta
gactgatttctctcataaatacagagatgtacagcttcctttttgtccggagatctaaagataatcttctctcctgttaataactct
agacgattagtaatatatctcagatcaaagttatgtccgttaaaggtaacgacatagtcgaacgttagttccaacaattgtttagct
attcgtaacaaaactatttcagaacataaaactagttctcgttcgtaatccatttccattagtgactgtatcctcaaacatcctcta
tcgacggcttcttgtatttcctgttccgttaacatctcttcattaatgagcgtaaacaataatcgtttaccacttaaatcgatataa
cagtaacttgtatgcgagattgggttaataaatacagaaggaaacttcttatcgaagtgacactctatatctagaaataagtacgat
cttgggatatcgaatctaggtatttttttagcgaaacagttacgtggatcgtcacaatgataacatccattgttaatctttgtcaaa
tattgctcgtccaacgagtaacatccgtctggagatatcccgttagaaatataaaaccaactaatattgagaaattcatccatggtg
gcattttgtatgctgcgtttctttggctcttctatcaaccacatatctgcgacggagcattttctatctttaatatctagattataa
cttattgtctcgtcaatgtctatagttctcatctttcccaacggcctcgcattaaatggaggaggagacaatgactgatatatttcg
tccgtcactacgtaataaaagtaatgaggaaatcgtataaatacggtctcaccatttcgacatctggatttcagatataaaaatctg
ttttcaccgtgactttcaaaccaattaatgcaccgaacatccatttatagaatttagaaatatattttcatttaaatgaatcccaaa
cattggggaagagccgtatggaccattatttttatagtactttcgcaagcgggtttagacggcaacatagaagcgtgtaaacgaaaa
ctatatactatagttagcactcttccatgtcctgcatgtagacggcacgcgactatcgctatagaggacaataatgtcatgtctagc
gatgatctgaattatatttattattttttcatcagattatttaacaatttggcatctgatcccaaatacgcgatcgatgtgacaaag
gttaaccctttataaacttaacccattataaaacttatgattagtcacgactgaaataaccgcgtgattattttttggtataattct
acacggcatggtttctgtgactatgaattcaacccccgttacattagtgaaatctttaacaaacagcaagggttcgtcaaagacata
aaactcattgtttacaatcgaaatagaccccctatcacacttaaaataaaaaatatccttatcctttaccaccaaataaaattctga
ttggtcaatgtgaatgtattcacttaacagttccacaaatttatttattaactccgaggcacatacatcgtcggtattttttatggc
aaactttactcttccagcatccgtttctaaaaaaatattaacgagttccatttatatcatccaatattattgaaatgacgttgatgg
acaaatgatacaaataagaaggtacggtacctttgtccaccatctcctccaattcatgctctattttgtcattaactttaatgtatg
aaaacagtacgccacatgcttccatgacagtgtgtaacactttggatacaaaatgtttgacattagtataattgttcaagactgtca
atctataatagatagtagctataatatattctatgatggtattgaagaagatgacaaccttggcatattgatcatttaacacagaca
tggtatcaacagatagcttgaatgaaagagaatcagtaattggaataagcgtcttctcgatggagtgtccgtataccaacatgtctg
atattttgatgtattccattaaattatttagttttttctttttattctcgttaaacagcatttctgtcaacggaccccaacatcgtt
gaccgattaagttttgattgatttttccgtgtaaggcgtatctagtcagatcgtatagcctatccaataatccatcgtctgtgtgta
gatcacatcgtacactttttaattctctatagaagagcgacagacatctggagcaattacagacagcaatttctttattctctacag
atgtaagatacttgaagacattcctatgatgatgcagaattttggataacacggtattgatggtatctgttaccataattcctttga
tggctgatagtgtcagagcacaagatttccaatctttgacaatttttagcaccattatctttgttttgatatctatatcagacagca
tggtgcgtctgacaacacaaggattaagacggaaagatgaaatgattctctcaacatcttcaatggataccttgctattttttctgg
cattatctatatgtgcgagaatatcctctagagaatcagtatcctttttgatgatagtggatctcaatgacatgggacgtctaaacc
ttcttattctatcaccagattgcatggtgatttgtcttctttcttttatcataatgtaatctctaaattcatcggcaaattgtctat
atctaaaatcataatatgagatgtttacctctacaaatatctgttcgtccaatgttagagtatttacatcagttttgtattccaaat
taaacatggcaacggatttaattttatattcctctattaagtcctcgtcgataataacagaatgtagataatcatttaatccatcgt
acatggttggaagatgctcgttgacaaaatctttaattgtcttgatgaaggtgggactatatctaacatcttgattaataaaattta
taacattgtccataggatactttgtaactagttttatacacatctcttcatcggtaagtttagacagaatatcgtgaacaggtggta
tattatattcatcagatatacgaagaacaatgtccaaatctatattgtttaatatattatatagatgtagtgtagctcctacaggaa
tatctttaactaagtcaatgatttcatcaaccgttagatctattttaaagttaatcatataggcattgatttttaaaaggtatgtag
ccttgactacattctcattaattaaccattccaagtcactgtgtgtaagaagattatattctatcataagcttgactacatttggtc
ccgataccattaaagaattcttatgatataaggaaacagattttaggtactcatctactctacaagaattttggagagccttaacga
tatcagtgacgtttattatttcaggaggaaaaaacctaacattgagaatatcggaattaatagcttccagatacagtgattttggca
atagtccgtgtaatccataatccagtaacacgagctggtgcttgctagacaccttttcaatgtttaatttttttgaaataagctttg
ataaagccttcctcgcaaattccggatacatgaacatgtcggcgacatgattaagtattgttttttcattatttttatattttctca
acaagttctcaataccccaatagatgatagaatatcacccaatgcgtccatgttgtctatttccaacaggtcgctatatccaccaat
agaagttttcccaaaaaagattctaggaacagttctaccaccagtaatttgttcaaaatagtcacgcaattcattttcgggtttaaa
ttctttaatatcgacaatttcatacgctcctcttttgaaactaaacttatttagaatatccagtgcatttctacaaaaaggacatgt
atacttgacaaaaattgtcactttgttattggccaacctttgttgtacaaattcctcggccattttaatatttaagtgatataaaac
tatctcgacttatttaactctttagtcgagatatatggacgcagatagctatatgatagccaactacagaaggcaaacgctataaaa
aacataattacgacgagcatatttataaatatttttattcagcattacttgatatagtaatattaggcacagtcaaacattcaacca
ctctcgatacattaactctctcattttctttaacaaattctgcaatatcttcgtaaaaagattcttgaaactttttagaatatctat
cgactctagatgaaatagcgttcgtcaacatactatgttttgtatacataaaggcgcccattttaacagtttctagtgacaaaatgc
tagcgatcctaggatcctttagaatcacatagattgacgattcgtctctcttagtaactctagtaaaataatcatacaatctagtac
gcgaaataatattatccttgacttgaggagatctaaacaatctagttttgagaacatcgataagttcatcgggaatgacatacatac
tatctttaatagaactcttttcatccagttgaatggattcgtccttaaccaactgattaatgagatcttctattttatcattttcca
gatgatatgtatgtccattaaagttaaattgtgtagcgcttctttttagtctagcagccaatactttaacatcactaatatcgatat
acaaaggagatgatttatctatggtattaagaattcgtttttcgacatctgtcaaaaccaattcctttttgcctgtatcatccagtt
ttccatcctttgtaaagaaattattttctactagactattaataagactgataaggattcctccataattgcacaatccaaactttt
tcacaaaactagactttacaagatctacaggaatgcgtacttcaggtttcttagcttgtgattttttcttttgtggacattttcttg
tgaccaactcatctaccatttcattgattttagcagtgaaataagctttcaatgcacgggcactgatactattgaaaacgagttgat
cttcaaattccgccatttaagttcaccaaacaacttttaaatacaaatatatcaatagtagtagaataagaactataaaaaaaataa
taattaaccaataccaaccccaacaaccggtattattagttgatgtgactgttttctcatcacttagaacagatttaacaatttcta
taaagtctgtcaaatcatcttccggagaccccataaatacaccaaatatagcggcgtacaacttatccatttatacattgaatattg
gcttttctttatcgctatcttcatcatattcatcatcaatatcaacaagtcccagattacgagccagatcttcttctacattttcag
tcattgatacacgttcactatctccagagagtccgataacgttagccaccacttctctatcaatgattagtttcttgagtgcgaatg
taatttttgtttccgttccggatctatagaaaactacaggtgtgataattgccttggccaattgtctttctcttttactgagtgatt
ctagttcaccttctatagatctgagaatggatgattctccagtcgaaacatattctaccatggctccgtttaatttgttgatgaaga
tggattcatccttaaatgttttctctgtaatagtttccaccgaaagactatgcaaagaatttggaatgcgttccttgtgcttaatgt
ttccatagacggcttctagaagttgatacaacataggactagccgcggtaacttttatttttagaaagtatccatcgcttctatctt
gtttagatttatttttataaagtttagtctctccttccaacataataaaagtggaagtcatttgactagataaactatcagtaagtt
ttatagagatagacgaacaattagcgtattgagaagcatttagtgtaacgtattcgatacattttgcattagatttactaatcgatt
ttgcatactctataacacccgcacaagtctgtagagaatcgctagatgcagtaggtcttggtgaagtttcaactctcttcttgatta
ccttactcatgattaaacctaaataattgtactttgtaatataatgatatatattttcactttatctcatttgagaataaaaatgtt
tttgtttaaccactgcatgatgtacagatttcggaatcacaaaccaccggtggttttattttatccttgtccaatgtgaattgaatg
ggagcggatgcgggtttcgtacgtagatagtacattcccgtttttagaccgagactccatccgtaaaaatgcatactcgttagtttg
gaataactcggatctgctatatggatattcatagattgactttgatcgatgaaggctcccctgtctgcagccatttttatgatcgtc
ttttgtggaatttcccaaatagttttataaactcgcttaatatcttctggaaggtttgtattctgaatggatccaccatctgccata
atcctattcttgatctcatcattccataattttctctcggttaaaactctaaggagatgcggattaactacttgaaattctccagac
aatactctccgagtgtaaatattactggtatacggttccaccgactcattatttcccaaaatttgagcagttgatgcagtcggcata
ggtgccaccaataaactatttctaagaccgtatgttctgattttatcttttagaggttcccaattccaaagatccgacggtacaaca
ttccaaagatcatattgtagaataccgttactggcgtacgatcctacatatgtatcgtatggtccttccttctcagctagttcacaa
ctcgcctctaatgcaccgtaataaatggtttcgaagatcttcttatttagatcttgtgcttccaggctatcaaatggataatttaag
agaataaacgcgtccgctaatccttgaacaccaataccgataggtctatgtctcttattagagatttcagcttctggaataggataa
taattaatatctataattttattgagatttctgacaattactttgaccacatccttcagtttgagaaaatcaaatcgcccatctatt
acaaacatgttcaaggcaacagatgccagattacaaacggctacctcattagcatccgcatattgtattatctcagtgcaaagatta
ctacacttgatagttcctaaattttgttgattactctttttgttacacgcatccttataaagaatgaatggagtaccagtttcaatc
tgagattctataatcgctttccagacgactcgagcctttattatagatttgtatctcctttctctttcgtatagtgtatacaatcgt
tcgaactcgtctccccaaacattgtccaatccaggacattcatccggacacatcaacgaccactctccgtcatccttcactcgtttc
ataaagagatcaggaatccaaagagctataaatagatctctggttctatgttcctcgtttcctgtattctttttaagatcgaggaac
gccataatatcagaatgccacggttccaagtatatggccataactccaggccgtttgtttcctccctgatctatgtatctagcggtg
ttattataaactctcaacattggaataataccgtttgatataccattggtaccggagatatagcttccactggcacgaatattacta
attgatagacctattccccctgccattttagagattaatgcgcatcgttttaacgtgtcatagataccctctatgctatcatcgatc
atgttaagtagaaaacagctagacatttggtgacgactagttcccgcattaaataaggtaggagaagcgtgcgtaaaccatttttca
gaaagtagattgtacgtctcaatagctgagtctatatcccattgatgaattcctactgcgacacgcattaacatgtgctgaggtctt
tcaacgatcttgttgtttattttcaacaagtaggatttttccaaagttttaaaaccaaaatagttgtatgaaaagtctcgttcgtaa
ataataaccgagttgagtttatccttatatttgttaactatatccatggtgatacttgaaataatcggagaatgtttcccattttta
ggattaacatagttgaataaatcctccatcacttcactaaatagtttttttgtttccttgtgtagatttgatacggctattctggcg
gctagaatggcataatccggatgttgtgtagtacaagtggctgctatttcggctgccagagtgtccaattctaccgttgttactcca
ttatatattccttgaataaccttcatagctattttaataggatctatatgatccgtgtttaagccataacataattttctaatacga
gacgtgattttatcaaacatgacattttccttgtatccatttcgtttaatgacaaacatttttgttggtgtaataaaaaaattattt
aacttttcattaatagggatttgacgtacgtagcgtacaaaatgattgttcctggtatatagataaagagtcctatatatttgaaaa
tcgttacggctcgattaaactttaatgattgcatagtgaatatatcattaggatttaactccttgactatcagggcggcaccagaaa
ttaccatcaaaagcattaatacagttatgcctatcgcagttagaacggttatagcatccaccatttatatctaaaaattagatcaaa
gaatatgtgacaaagtcctagttgtatattgagaattgacaaaacaatgtttcttacatattttttttttattagtaaccgacttaa
tagtaggaactggaaaactagacttgattattctataagtatagatacccttccaaataatattctctttgataaaagttccagaaa
atgtagaattttttaaaaagttatcttttgctattaccaagattgtgtttagacgcttattattaatatgagtgatgaaatccacac
cgcctctagatatcgcctttatttccacattagatggtaaatccaatagtgaaactatctttttaggaatgtatggactcgcgttta
gaggagtgaacgtcttgggcgtcggaaaggatgattcgtcaaacgaataaacaatttcacaaatggatgttaatgtattagtaggaa
attttttgacgctagtggaattgaaaattctaatggatgatgttctacctatttcatccgataacatgttaatttccgacaccaacg
gttttaatatttcgatgatatacggtagtctctctttcggacttatatagcttattccacaatacgagtcattatatactccaaaaa
acaaaataactagtataaaatctgtatcgaatgggaaaaacgaaattatcgacataggtatagaatccggaacattgaacgtattaa
tacttaattctttttctgtggtaagtaccgataggttattgacattgtatggttttaaatattctataacttgagacttgatagata
ttagtgatgaattgaaaattatttttatcaccacgtgtgtttcaggatcatcgtcgacgcccgtcaaccaaccgaacggagtaaaat
aaatatcattaatatatgctctagatattagtatttttatcaatcctttgattatcatcttctcgtaggcgaatgattccatgatca
agagtgatttaagaacatcctccggagtattaatgggcttagtaaacagtccatcgttgcaataataaaagttatccaagttaaagg
atattatgcattcgtttaaagatatcacctcatctgacggagacaattttttggtaggttttagagactttgaagctacttgtttaa
caaagttattcatcgtcgtttactattctatttaattttgtagttaatttatcacatatcacattaattgactttttggtccatttt
tccatacgtttatattcttttaatcctgcgttatccgtttccgttatatccagtgatagatcgtgcaggttaaatagaatgctctta
aataatgtcatttttttatccgctaaaaatttaaagaatgtataaacttttttcaaagatttaaaacttttaggtggtgtcctagta
cacaatatcataaacaaactaataaacatcccgcattcagattccaacagctgattaacttccacattaatacagcctattttcgct
ccaaatgtacattcgaaaaatctgaataaaacatcaatgtcgcaatttgtattatccaatacagaatgtttgtgattcgtgttaaaa
ccatcggagaaggaatagaaataaaaattattatagtggtggaattcagttggaatattgcctccggagtcataaaaggatactaaa
cattgttttttatcataaattacacatttccaatgagacaaataacaaaatccaaacattacaaatctagaggtagaacttttaatt
ttgtctttaagtatatacgataagatatgtttattcataaacgcgtcaaatttttcatgaatcgctaaggagtttaagaatctcatg
tcaaattgtcctatataatccacttcggatccataagcaaactgagagactaagttcttaatacttcgattgctcatccaggctcct
ctctcaggctctattttcatcttgacgacctttggattttcaccagtatgtattccttttttttctagacactaaataaaatattta
aaatataatattaatgtactaaaacttatatattattaatttatctaactaaagttagtaaattatatatataattttataattaat
ttaattttactaattttatttagtgtctagaaaaaaa

[0076] An example of sVAC fragment 2 (F2, 66679 bp in length) (SEQ ID NO: 17):

tttttttctagacactaaataaaatatttaaaatataatattaatgtactaaaacttatatattattaatttatctaactaaagtta
gtaaattatatatataattttataattaatttaattttactaattttatttagtgtctagaaaaaaaccccctgccattttagagatt
aatgcgcatcgttttaacgtgtcatagataccctctatgctatcatcgatcatgttaagtagaaaacagctagacatttggt
gacgactagttcccgcattaaataaggtaggagaagcgtgcgtaaaccatttttcagaaagtagattgtacgtctcaat
agctgagtctatatcccattgatgaattcctactgcgacacgcattaacatgtgctgaggtctttcaacgatcttgttgtttat
tttcaacaagtaggatttttccaaagttttaaaaccaaaatagttgtatgaaaagtctcgttcgtaaataataaccgagttg
agtttatccttatatttgttaactatatccatggtgatacttgaaataatcggagaatgtttcccatttttaggattaacatagtt
gaataaatcctccatcacttcactaaatagtttttttgtttccttgtgtagatttgatacggctattctggcggctagaatggca
taatccggatgttgtgtagtacaagtggctgctatttcggctgccagagtgtccaattctaccgttgttactccattatatatt
ccttgaataaccttcatagctattttaataggatctatatgatccgtgtttaagccataacataattttctaatacgagacgtg
attttatcaaacatgacattttccttgtatccatttcgtttaatgacaaacatttttgttggtgtaataaaaaaattatttaactttt
cattaatagggatttgacgtacgtagcgtacaaaatgattgttcctggtatatagataaagagtcctatatatttgaaaatc
gttacggctcgattaaactttaatgattgcatagtgaatatatcattaggatttaactccttgactatcagggcggcaccag
aaattaccatcaaaagcattaatacagttatgcctatcgcagttagaacggttatagcatccaccatttatatctaaaaat
tagatcaaagaatatgtgacaaagtcctagttgtatattgagaattgacaaaacaatgtttcttacatattttttttttattagt
aaccgacttaatagtaggaactggaaaactagacttgattattctataagtatagatacccttccaaataatattctctttg
ataaaagttccagaaaatgtagaattttttaaaaagttatcttttgctattaccaagattgtgtttagacgcttattattaatat
gagtgatgaaatccacaccgcctctagatatcgcctttatttccacattagatggtaaatccaatagtgaaactatcttttt
aggaatgtatggactcgcgtttagaggagtgaacgtcttgggcgtcggaaaggatgattcgtcaaacgaataaacaa
tttcacaaatggatgttaatgtattagtaggaaattttttgacgctagtggaattgaaaattctaatggatgatgttctaccta
tttcatccgataacatgttaatttccgacaccaacggttttaatatttcgatgatatacggtagtctctctttcggacttatata
gcttattccacaatacgagtcattatatactccaaaaaacaaaataactagtataaaatctgtatcgaatgggaaaaac
gaaattatcgacataggtatagaatccggaacattgaacgtattaatacttaattctttttctgtggtaagtaccgataggtt
attgacattgtatggttttaaatattctataacttgagacttgatagatattagtgatgaattgaaaattatttttatcaccacgt
gtgtttcaggatcatcgtcgacgcccgtcaaccaaccgaacggagtaaaataaatatcattaatatatgctctagatatt
agtatttttatcaatcctttgattatcatcttctcgtaggcgaatgattccatgatcaagagtgatttaagaacatcctccgga
gtattaatgggcttagtaaacagtccatcgttgcaataataaaagttatccaagttaaaggatattatgcattcgtttaaag
atatcacctcatctgacggagacaattttttggtaggttttagagactttgaagctacttgtttaacaaagttattcatcgtcgt
ttactattctatttaattttgtagttaatttatcacatatcacattaattgactttttggtccatttttccatacgtttatattcttttaatc
ctgcgttatccgtttccgttatatccagtgatagatcgtgcaggttaaatagaatgctcttaaataatgtcatttttttatccgct
aaaaatttaaagaatgtataaacttttttcaaagatttaaaacttttaggtggtgtcctagtacacaatatcataaacaaac
taataaacatcccgcattcagattccaacagctgattaacttccacattaatacagcctattttcgctccaaatgtacattc
gaaaaatctgaataaaacatcaatgtcgcaatttgtattatccaatacagaatgtttgtgattcgtgttaaaaccatcgga
gaaggaatagaaataaaaattattatagtggtggaattcagttggaatattgcctccggagtcataaaaggatactaa
acattgttttttatcataaattacacatttccaatgagacaaataacaaaatccaaacattacaaatctagaggtagaact
tttaattttgtctttaagtatatacgataagatatgtttattcataaacgcgtcaaatttttcatgaatcgctaaggagtttaaga
atctcatgtcaaattgtcctatataatccacttcggatccataagcaaactgagagactaagttcttaatacttcgattgctc
atccaggctcctctctcaggctctattttcatcttgacgacctttggattttcaccagtatgtattcctttacgtgataaatcatc
gattttcaaatccatttgtgagaagtctatcgccttagatactttttcccgtagtcgaggtttaaagaaatacgctaacggta
tactagtaggtaactcaaaaacatcatatatagaatggtaacgcgtctttaactcgtcggttaactctttcttttgatcgagtt
cgtcgctactattgggtctgctcaggtgccccgactctactagttccaacatcataccgataggaatacaagacactttg
ccggcggttgtagatttatcatatttttccactacatatccgttacaatttgttaaaaatttagatacatctatattgctacataa
tccagctagtgaatatatatgacataataaattggtaaatcctagttctggtattttactaattactaaatctgtatatctttcc
atttatcatggaaaagaatttaccagatatcttcttttttccaaactgcgttaatgtattctcttacaaatattcacaagatgaa
ttcagtaatatgagtaaaacggaacgtgatagtttctcattggccgtgtttccagttataaaacatagatggcataacgc
acacgttgtaaaacataaaggaatatacaaagttagtacagaagcacgtggaaaaaaagtatctcctccatcactag
gaaaacccgcacacataaacctaaccgcgaagcaatatatatacagtgaacacacaataagctttgaatgttatagt
tttctaaaatgtataacaaatacagaaatcaattcgttcgatgagtatatattaagaggactattagaagctggtaatagt
ttacagatattttccaattccgtaggtaaacgaacagatactataggtgtactagggaataagtatccatttagcaaaatt
ccattggcctcattaactcctaaagcacaacgagagatattttcagcgtggatttctcatagacctgtagttttaactgga
ggaactggagtgggtaagacgtcacaggtacccaagttattgctttggtttaattatttatttggtggattctctactctagat
aaaatcactaactttcacgaaagaccagtcattctatctcttcctaggatagctttagttagattgcatagcaataccatttt
aaaatcattgggatttaaggtactagatggatctcctatttctttacggtacggatctataccggaagaattaataaacaa
acaaccaaaaaaatatggaattgtattttctacccataagttatctctaacaaaactatttagttatggcactcttattatag
acgaagttcatgagcatgatcaaataggagatattattatagcagtagcgagaaagcatcatacgaaaatagattcta
tgtttttaatgactgccacgttagaggatgaccgagaacggctaaaagtatttttacctaatcccgcatttatacatattcct
ggagatacactgtttaaaattagcgaggtatttattcataataagataaatccatcttccagaatggcatacatagaaga
agaaaagagaaatttagttactgctatacagatgtatactcctcctgatggatcatccggtatagtctttgtggcatccgtt
gcacagtgtcacgaatataaatcatatttagaaaaaagattaccgtatgatatgtatattattcatggtaaggtcttagata
tagacgaaatattagaaaaagtgtattcatcacctaatgtatcgataattatttctactccttatttggaatccagcgttacta
tacgcaatgttacacacatttatgatatgggtaaagtttttgtccccgctccttttggaggatcgcaagaatttatttctaaat
ctatgagagatcaacgaaaaggaagagtaggaagagttaatcctggtacatacgtctatttctatgatctgtcttatatg
aagtctatacagcgaatagattcagaatttctacataattatatattgtacgctaataagtttaatctaacactccccgaag
atttgtttataatccctacaaatttggatattctatggcgtacaaaggaatatatagactcgttcgatattagtacagaaac
atggaataaattattatccaattattatatgaagatgatagagtatgctaaactttatgtactaagtcctattctcgctgagg
agttggataactttgagaggacgggagaattaactagtattgtacgagaagccattttatctctaaatttacgaattaaga
ttttaaattttaaacataaagatgatgatacgtatatacacttttgtaaaatattattcggtgtctataacggaacaaacgct
actatatattatcatagacctctaacgggatatatgaatatgatttcagatactatatttgttcctgtagataataactaaaa
atcaaactctaatgaccacatctttttttagagatgaaaaattttctacatctccttttgtagacacgactaaacattttgcaa
aaaaaagtttattagtgtttagataatcgtatacttcatcagtgtagatagtaaatgtgaacaaataaaaggtattcttact
caatagattggtaaattccatagaatatattaatcctttcttcttgagatcccacatcatttcaaccagagacgttttatcca
atgatttacctcgtactataccacatacaaaactagattttgcagtgacgtcgtacctggtattcctaccaaacaaaatttt
acttttagttcttttagaaaattctaaggtagaatctctatttgccaatatgtcatctatggaattaccactagcaaaaaatg
atagaaatatatattgatacatcgcagctggttttgatctactatactttaaaaacgaatcagattccataattgcctgtata
tcatcagctgaaaaactatgttttacacgtattccttcggcatttctttttaatgatatatcttgtttagacaatgataaagttatc
atgtccatgagagacgcgtctccgtatcgtataaatatttcattagatgttagacgcttcattaggggtatacttctataagg
tttcttaatcagtccatcattggttgcgtcaagaactactatcggatgttgttgggtatctctagtgttacacatggccttacta
aagtttgggtaaataactatgatatctctattaattatagatgcatatatttcattcgtcaaggatattagtatcgacttgctat
cgtcattaatacgtgtaatgtaatcatataaatcatgcgatagccaaggaaaattcaaatagatgttcatcatataatcgt
cgctataattcatattaatacgttgacattgactaatttgtaatatagcctcgccacgaagaaagctctcgtattcagtttca
tcgataaaggataccgttaaatataactggttgccgatagtctcatagtctattaagtggtaagtttcgtacaaatacaga
atccctaaaatattatctaatgttggattaatctttaccataactgtataaaatggagacggagtcataactattttaccgttt
gtacttactggaatagacgaaggaataatctccggacatgctggtaaagacccaaatgtctgtttgaagaaatccaat
gttccaggtcctaatctcttaacaaaaattacgatattcgatcccgatatcctttgcattctatttaccagcatatcacgaac
tatattaagattatctatcatgtctattctcccaccgttatataaatcgcctccgctaagaaacgttagtatatccatacaatg
gaatacttcatttctaaaatagtattcgttttctaattctttaatgtgaaatcgtatactagaaagggaaaaattatctttgagtt
ttccgttagaaaagaaccacgaaactaatgttctgattgcgtccgattccgttgctgaattaatggatttacaccaaaaa
ctcatataacttctagatgtagaagcattcgctaaaaaattagtagaatcaaaggatataagtagatgttccaacaagt
gagcaattcccaagatttcatctatatcattctcgaatccgaaattagaaattcccaagtagatatcctttttcatccgatcg
ttgatgaaaatacgaactttattcggtaagacaatcatttactaaggagtaaaataggaagtaatgttcgtatgtcgttatc
atcgtataaattaaaggtgtgttttttaccattaagtgacattataattttaccaatattggaattataatataggtgtatttgcg
cactcgcgacggttgatgcatcggtaaatatagctgtatctaatgttctagtcggtatttcatcatttcgctgtctaataatag
cgttttctctatctgtttccattacagctgcctgaagtttattggtcggataatatgtaaaataataagaaatacatacgaat
aacaaaaataaaataagatataataaagatgccatttagagatctaattttgttcaacttgtccaaattcctacttacaga
agatgaggaatcgttggagatagtgtcttccttatgtagaggatttgaaatatcttatgatgacttgataacttactttccag
ataggaaataccataaatatatttctaaagtatttgaacatgtagatttatcggaggaattaagtatggaattccatgata
caactttgcgagatttagtctatcttagattgtacaagtattccaagtgtatacggccgtgttataaattaggagataatcta
aaaggcatagttgttataaaggacaggaatatttatattagggaagcaaatgatgacttgatagaatatctcctcaagg
aatacactcctcagatttatacatattctaatgagcgcgtccccataactggttcaaaattaattctttgtggattttctcaag
ttacatttatggcgtatacaacgtcgcatataacaacaaataaaaaggtagatgttctcgtttccaaaaaatgtatagat
gaactagtcgatccaataaattatcaaatacttcaaaatttatttgataaaggaagcggaacaataaacaaaatactc
aggaagatattttattcggtaacaggtggccaaactccataggtagctttttctatttcggattttagaatttccaaattcacc
agcgatttatctgttttggtgaaatccaaggatttattaatgtccacaaatgccatttgttttgtctgtggattgtatttgaaaat
ggaaacgatgtagttagatagatgcgctgcgaagtttcctattagggttccgcgcttcacgtcacccagcatacttgaat
caccatcctttaaaaaaaatgataagatatcaacatggagtatatcatactcggattttaattcttctactgcatcactgac
attttcacaaatactacaatacggtttaccgaaaataatcagtacgttcttcatttatgggtatcaaaaacttaaaatcgtta
ctgctggaaaataaatcactgacgatattagatgataatttatacaaagtatacaatggaatatttgtggatacaatgag
tatttatatagccgtcgccaattgtgtcagaaacttagaagagttaactacggtattcataaaatacgtaaacggatggg
taaaaaagggagggcatgtaaccctttttatcgatagaggaagtataaaaattaaacaagacgttagagacaagag
acgtaaatattctaaattaaccaaggacagaaaaatgctagaattagaaaagtgtacatccgaaatacaaaatgtta
ccggatttatggaagaagaaataaaggcagaaatgcaattaaaaatcgataaactcacatttcaaatatatttatctga
ttctgataacataaaaatatcattgaatgagatactaacacatttcaacaataatgagaatgttacattattttattgtgatg
aacgagacgcagaattcgttatgtgtctcgaggctaaaacacatttctctaccacaggagaatggccgttgataataa
gtaccgatcaggatactatgctatttgcatctgctgataatcatcctaagatgataaaaaacttaactcaactgtttaaata
tgttccatctgcagaggataactatttagcaaaattaacggcgttagtgaatggatgtgatttctttcctggactctatggg
gcatctataacacccaacaacttaaacaaaatacaattgtttagtgattttacaatcgataatatagtcactagtttggca
attaaaaattattatagaaagactaactctaccgtagacgtgcgtaatattgttacgtttataaacgattacgctaatttag
acgatgtctactcgtatattcctccttgtcaatgcactgttcaagaatttatattttccgcattagatgaaaaatggaatgaat
ttaaatcatcttatttagaaagcgtgccgttaccctgccaattaatgtatgcgttagaaccacgcaaggagattgatgtttc
agaagttaaaactttatcatcttatatagatttcgaaaatactaaatcagatatcgatgttataaaatctatatcctcgatctt
cggatattctaacgaaaactgtaacacgatagtattcggcatctataaggataatttactactgagtataaatagttcattt
tactttaacgatagtctgttaataaccaatactaaaagtgataatataataaatataggttactagattaaaaatggtgttc
caactcgtgtgctctacgtgcggcaaagatatttctcacgaacgatataaattgattatacgaaaaaaatcattaaagg
atgtactcgtcagtgtaaagaacgaatgttgtaggttaaaattatctacacaaatagaacctcaacgtaacttaacagt
gcaacctctattggatataaactaatatggatccggttaattttatcaagacatatgcgcctagaggttctattatttttatta
attataccatgtcattaacaagtcatttgaatccatcgatagaaaaacatgtgggtatttattatggtacgttattatcggaa
cacttggtagttgaatcaacatatagaaaaggagttcgaatagtcccattggatagtttttttgaaggatatcttagtgcaa
aagtatacatgttagagaatattcaagttatgaaaatagcagctgatacgtcattaactttattgggtattccgtatggattt
ggtcatgatagaatgtattgttttaaattggtagctgactgttataaaaatgccggtattgatacatcgtctaaacgaatatt
aggtaaagatatttttctgagccaaaacttcacagacgataatagatggataaagatatatgattctaataatttaacattt
tggcaaattgattaccttaaagggtgagttaatatgcataactactcctccgttgttttttccctcgttctttttcttaacgttgttt
gccatcactctcataatgtaaagatattctaaaatggtaaacttttgcatatcggacgcagaaattggtataaatgttgta
attgtattatttcccgtcaatggactagtcacagctccatcagttttatatcctttagagtatttctcactcgtgtctaacattcta
gagcattccatgatctgtttatcgttgatattggccggaaagatagattttttattttttattatattactattggcaattgtagata
taacttctggtaaatatttttctaccttttcaatctcttctattttcaagccggctatatattctgctatattgttgctagtatcaata
ccttttctggctaagaagtcatatgtggtattcactatatcagttttaactggtagttccattagcctttccacttctgcagaat
aatcagaaattggttctttaccagaaaatccagctactataataggctcaccgatgatcattggcaaaatcctatattgta
ccagattaatgagagcatatttcatttccaataattctgctagttcttgagacattgatttatttgatgaatctagttggttctct
agatactctaccatttctgccgcatacaataacttgttagataaaatcagggttatcaaagtgtttagcgtggctagaata
gtgggcttgcatgtattaaagaatgcggtagtatgagtaaaccgttttaacgaattatatagtctccagaaatctgtggcg
ttacatacatgagccgaatgacatcgaagattgtccaatatttttaatagctgctctttgtccattatttctatatttgactcgc
aacaattgtagataccattaatcaccgattcctttttcgatgccggacaatagcacaattgtttagctttggactctatgtatt
cagaattaatagatatatctcttaatacagattgcactatacattttgaaactatgtcaaaaattgtagaacgacgctgttc
tgcagccatttaactttaaataatttacaaaaatttaaaatgagcatccgtataaaaatcgataaactgcgccaaattgt
ggcatatttttcagagttcagtgaagaagtatctataaatgtagactcgacggatgagttaatgtatatttttgccgccttgg
gcggatctgtaaacatttgggccattatacctctcagtgcatcagtgttctaccgcggagccgaaaatattgtgtttaatct
tcctgtgtccaaggtaaaatcgtgtttgtgtagttttcacaatgatgccatcatagatatagaacctgatctggaaaataat
ctagtaaaactttctagttatcatgtagtaagtgtcgattgtaataaggaactgatgcctattaggacagatactactatttg
tctaagtatagatcaaaagaaatcttacgtgtttaattttcacaagtatgaagaaaaatgttgtggtagaaccgtcattcat
ttagaatggttgttgggctttatcaagtgtattagtcagcatcagcatttggctattatgtttaaagatgacaatattattatga
agactcctggtaatactgatgcattttccagggaatattctatgactgaatgttctcaagaactacaaaagttttctttcaaa
atagctatctcgtctctcaacaaactacgaggattcaaaaagagagtcaatgtttttgaaactagaatcgtaatggata
atgacgataacattttaggaatgttgttttcggatagagttcaatcctttaagatcaacatctttatggcgtttttagattaata
ctttcaatgagataaatatgggtggcggagtaagtgttgagctccctaaacgggatccgcctccgggagtacccactg
atgagatgttattaaacgtggataaaatgcatgacgtgatagctcccgctaagcttttagaatatgtgcatataggacca
ctagcaaaagataaagaggataaagtaaagaaaagatatccagagtttagattagtcaacacaggacccggtggt
ctttcggcattgttaagacaatcgtataatggaaccgcacccaattgctgtcgcacttttaatcgtactcattattggaaga
aggatggaaagatatcagataagtatgaagagggtgcagtattagaatcgtgttggccagacgttcacgacaccgg
aaaatgcgatgttgatttattcgactggtgtcagggggatacgttcgatagaaacatatgccatcagtggatcggttcag
cctttaataggagtaatagaactgtagagggtcaacaatcgttaataaatctgtataataagatgcaaacattatgtagt
aaagatgctagtgtaccaatatgtgaatcatttttgcatcatttacgcgcacacaatacagaagatagcaaagagatg
atcgattatattctaagacaacagtctgcggactttaaacagaaatatatgagatgtagttatcccactagagataagtt
agaagagtcattaaaatatgcggaacctcgagaatgttgggatccagagtgttcgaatgccaatgttaatttcttgctaa
cacgtaattataataatttaggactttgcaatattgtacgatgtaatactagcgtgaacaacttacagatggataaaactt
cctcattaagattgtcatgtggattaagcaatagtgatagattttctactgttcccgtcaatagagcaaaagtagttcaaca
taatattaaacactcgttcgacctaaaattgcatttgatcagtttattatctctcttggtaatatggatactaattgtagctattt
aaatgggtgccgcggcaagcatacagacgacggtgaatacactcagcgaacgtatctcgtctaaattagaacaag
aagcgaatgctagtgctcaaacaaaatgtgatatagaaatcggaaatttttatatccgacaaaaccatggatgtaacc
tcactgttaaaaatatgtgctctgcggacgcggatgctcagttggatgctgtgttatcagccgctacagaaacatatagt
ggattaacaccggaacaaaaagcatacgtgccagctatgtttactgctgcgttaaacattcagacgagtgtaaacact
gttgttagagattttgaaaattatgtgaaacagacttgtaattctagcgcggtcgtcgataacaaattaaagatacaaaa
cgtaatcatagatgaatgttacggagccccaggatctccaacaaatttggaatttattaatacaggatctagcaaagga
aattgtgccattaaggcgttgatgcaattgacgactaaggccactactcaaatagcacctaaacaagttgctggtaca
ggagttcagttttatatgattgttatcggtgttataatattggcagcgttgtttatgtactatgccaagcgtatgttgttcacatc
caccaatgataaaatcaaacttattttagccaataaggaaaacgtccattggactacttacatggacacattctttagaa
cttctccgatggttattgctaccacggatatgcaaaactgaaaatatattgataatattttaatagattaacatggaagttat
cactgatcgtctagacgatatagtgaaacaaaatatagcggatgaaaaatttgtagattttgttatacacggtctagagc
atcaatgtcctgctatacttcgaccattaattaggttgtttattgatatactattatttgttatagtaatttatatttttacggtacgt
ctagtaagtagaaattatcaaatgttgttggcgttggtggcgctagtcatcacattaactattttttattactttatactataata
gtactagactgacttctaacaaacatctcacctgccataaataaatgcttgatattaaagtcttctatttctaacactattcc
atctgtggaaaataatactctgacattatcgctaattgacacatcggtgagtgatatgcctataaagtaataatcttctttg
ggcacatataccagtgtaccaggttctaacaacctatttactggtgctcctatagcatactttttctttaccttgagaatatcc
atcgtttgcttggtcaatagcgatatgtgattttttatcaaccactcgaaaaagtaattggagtgttcatatcctctacgggct
attgtctcatggccgtgtatgaaatttaagtaacacgactgtggtagatttgttctatagagccggttgccgcaaatagat
agaactaccaatatgtctgtacaaatgttaaacattaattgattaacagaaaaaacaatgttcgttctgggaatagaaa
ccagatcaaaacaaaattcgttagaatatatgccacgtttatacattgaatataaaataactacagtttgaaaaataac
agtatcatttaaacatttaacttgcggggttaatctcacaactttactgtttttgaactgttcaaaatatagcatagatccgtg
agaaatacgtttagccgcctttaatagaggaaatcccaccgcctttctggatctcaccaacgacgatagttctgaccag
caactcatttcttcatcatccacctgttttaacatataataggcaggagatagatatccgtcattgcaatattccttctcgtag
gcacacaatctaatattgataaaatctccattctcttctctgcatttattatcttgtttcggtggctgattaggctgtagtcttggt
ttaggctttggtatatcgttgttgaatctattttggtcattaaatctttcatttcttcctggtatatttttatcacctcgtttggttggatt
tttgtctatattatcgtttgtaacatcggtacgggtattcatttatcacaaaaaaaacttctctaaatgagtctactgctagaa
aacctcatcgaagaagataccatattttttgcaggaagtatatctgagtatgatgatttacaaatggttattgccggcgca
aaatccaaatttccaagatctatgctttctatttttaatatagtacctagaacgatgtcaaaatatgagttggagttgattcat
aacgaaaatatcacaggagcaatgtttaccacaatgtataatataagaaacaatttgggtctaggagatgataaacta
actattgaagccattgaaaactatttcttggatcctaacaatgaagttatgcctcttattattaataatacggatatgactgc
cgtcattcctaaaaaaagtggtaggagaaagaataagaacatggttatcttccgtcaaggatcatcacctatcttgtgta
ttttcgaaactcgtaaaaagattaatatttataaagaaaatatggaatccgcgtcgactgagtatacacctatcggaga
caacaaggctttgatatctaaatatgcgggaattaatatcctaaatgtgtattctccttccacatccataagattgaatgcc
atttacggattcaccaataaaaataaactagagaaacttagtactaataaggaactagaatcgtatagttctagccctct
tcaagaacccattaggttaaatgattttctgggactattggaatgtgttaaaaagaatattcctctaacagatattccgac
aaaggattgattactataaatggagaatgttcctaatgtatactttaatcctgtgtttatagagcccacgtttaaacattcttt
attaagtgtttataaacacagattaatagttttatttgaagtattcgttgtattcattctaatatatgtattttttagatctgaattaa
atatgttcttcatgcctaaacgaaaaatacccgatcctattgatagattacgacgtgctaatctagcgtgtgaagacgat
aaattaatgatctatggattaccatggatgacaactcaaacatctgcgttatcaataaatagtaaaccgatagtgtataa
agattgtgcaaagcttttgcgatcaataaatggatcacaaccagtatctcttaacgatgttcttcgcagatgatgattcattt
tttaagtatttggctagtcaagatgatgaatcttcattatctgatatattgcaaatcactcaatatctagactttctgttattatta
ttgatccaatcaaaaaataaattagaagccgtgggtcattgttatgaatctctttcagaggaatacagacaattgacaa
aattcacagactttcaagattttaaaaaactgtttaacaaggtccctattgttacagatggaagggtcaaacttaataaa
ggatatttgttcgactttgtgattagtttgatgcgattcaaaaaagaatcctctctagctaccaccgcaatagatcctgttag
atacatagatcctcgtcgcaatatcgcattttctaacgtgatggatatattaaagtcgaataaagtgaacaataattaatt
ctttattgtcatcatgaacggcggacatattcagttgataatcggccccatgttttcaggtaaaagtacagaattaattaga
cgagttagacgttatcaaatagctcaatataaatgcgtgactataaaatattctaacgataatagatacggaacggga
ctatggacgcatgataagaataattttgaagcattggaagcaactaaactatgtgatgtcttggaatcaattacagatttc
tccgtgataggtatcgatgaaggacagttctttccagacattgttgaattctgtgagcgtatggcaaacgaaggaaaaa
tagttatagtagccgcactcgatgggacatttcaacgtaaaccgtttaataatattttgaatcttattccattatctgaaatgg
tggtaaaactaactgctgtgtgtatgaaatgctttaaggaggcttccttttctaaacgattgggtgaggaaaccgagata
gaaataataggaggtaatgatatgtatcaatcggtgtgtagaaagtgttacatcgactcataatattatattttttatctaaa
aaactaaaaataaacattgattaaattttaatataatacttaaaaatggatgttgtgtcgttagataaaccgtttatgtatttt
gaggaaattgataatgagttagattacgaaccagaaagtgcaaatgaggtcgcaaaaaaactgccgtatcaagga
cagttaaaactattactaggagaattattttttcttagtaagttacagcgacacggtatattagatggtgccaccgtagtgt
atataggatctgctcccggtacacatatacgttatttgagagatcatttctataatttaggagtgatcatcaaatggatgct
aattgacggccgccatcatgatcctattttaaatggattgcgtgatgtgactctagtgactcggttcgttgatgaggaatat
ctacgatccatcaaaaaacaactgcatccttctaagattattttaatttctgatgtgagatccaaacgaggaggaaatga
acctagtacggcggatttactaagtaattacgctctacaaaatgtcatgattagtattttaaaccccgtggcgtctagtctt
aaatggagatgcccgtttccagatcaatggatcaaggacttttatatcccacacggtaataaaatgttacaaccttttgct
ccttcatattcagctgaaatgagattattaagtatttataccggtgagaacatgagactgactcgagttaccaaatcaga
cgctgtaaattatgaaaaaaagatgtactaccttaataagatcgtccgtaacaaagtagttgttaactttgattatcctaat
caggaatatgactattttcacatgtactttatgctgaggaccgtgtactgcaataaaacatttcctactactaaagcaaag
gtactatttctacaacaatctatatttcgtttcttaaatattccaacaacatcaactgaaaaagttagtcatgaaccaatac
aacgtaaaatatctagcaaaaattctatgtctaaaaacagaaatagcaagagatccgtacgcagtaataaatagaa
acgtactactgagatatactaccgatatagagtataatgatttagttactttaataaccgttagacataaaattgattctatg
aaaactgtgtttcaggtatttaacgaatcatccataaattatactccggttgatgatgattatggagaaccaatcattataa
catcgtatcttcaaaaaggtcataacaagtttcctgtaaattttctatacatagatgtggtaatatctgacttatttcctagcttt
gttagactagatactacagaaactaatatagttaatagtgtactacaaacaggcgatggtaaaaagactcttcgtcttcc
caaaatgttagagacggaaatagttgtcaagattctctatcgccctaatataccattaaaaattgttagatttttccgcaat
aacatggtaactggagtagagatagccgatagatctgttatttcagtcgctgattaatcaattagtagagatgagataag
aacattataataatcaataatatatcttatatctcgtttagaaaaatgctaatattaaaatagctaacgctagtaatccaat
cggaagccatttgatatctataatagggtatctaatttcctgattcagatagcggacagctatattctcggtagctactcgtt
tggaatcacaaacattatttacatctaatttactatctgtaatggaaacgtttcccaatgaaatggtacaatccgatacatt
gcattttgttatatttttttttaaagaggctggtaacaacgcatcgcttcgtttacatggctcgtaccaacaataatagggtaa
tcttgtatctattcctatccgtactatgcttttatcaggataaatacatttacatcgtatatcgtctttgttagcatcacagaatg
cataaatttgttcgtccgtcatgataaaaatttaaagtgtaaatataactattatttttatagttgtaataaaaagggaaattt
gattgtataccttcggttctttaaaagaaactgacttgataaaaatggctgtaatctctaaggttacgtatagtctatatgat
caaaaagagattaatgctacagatattatcattagtcatgttaaaaatgacgacgatatcggtaccgttaaagatggta
gactaggtgctatggatggggcattatgtaagacttgtgggaaaacggaattggaatgtttcggtcactggggtaaagt
aagtatttataaaactcatatagttaagcctgaatttatttcagaaattattcgtttactgaatcatatatgtattcactgcgga
ttattgcgttcacgagaaccgtattccgacgatattaacctaaaagagttatcgggacacgctcttaggagattaaagg
ataaaatattatccaagaaaaagtcatgttggaacagtgaatgtatgcaaccgtatcaaaaaattactttttcaaagaa
aaaggtttgtttcgtcaacaagttggatgatattaacgttcctaattctctcatctatcaaaagttaatttctattcatgaaaa
gttttggccattattagaaattcatcaatatccagctaacttattttatacagactactttcccatccctccgttgattattagac
cggctattagtttttggatagatagtatacccaaagaaaccaatgaattaacttacttattaggtatgatcgttaagaattgt
aacttgaatgctgatgaacaggttatccagaaggcggtaatagaatacgatgatattaaaattatttctaataacacttc
cagtatcaatttatcatatattacatccggcaaaaataatatgattagaagttatatcgtcgcccgacgaaaagatcaga
cggctagatctgtaattggtcccagtacatctatcaccgttaatgaggtaggaatgcccgcatatattagaaatacactt
acagaaaagatatttgttaatgcctttacagtggataaagttaaacaactattagcatcaaaccaagttaaattttacttta
ataaacgattaaaccaattaacaagaatacgccaaggaaagtttatcaaaaataaaatacatttattgcctggtgattg
ggtagaagtagctgttcaagaatatacaagtattatttttggaagacagccgtctctacatagatacaacgtcatcgcttc
atctatcagagctaccgaaggagatactatcaaaatatctcccggaattgccaactctcaaaatgctgatttcgacgga
gatgaagaatggatgatattagaacaaaatcctaaagctgtaattgaacaaagtattcttatgtatccgacgacgttact
caaacacgatattcatggagcccccgtttatggatctattcaagatgaaatcgtagcagcgtattcattgtttaggataca
agatctttgtttagatgaagtattgaacatcttggggaaatatggaagagagttcgatcctaaaggtaaatgtaaattca
gcggtaaagatatctatacttacttgataggtgaaaagattaattatccgggtctcttaaaggatggtgaaattattgcaa
acgacgtagatagtaattttgttgtggctatgaggcatctgtcattggctggactcttatccgatcataagtcgaacgtgga
aggtatcaactttattatcaagtcatcttatgtttttaagagatatctatctatttacggttttggggtgacattcaaagatctga
gaccaaattcgacgttcactaataaattggaggccatcaacgtagaaaaaatagaacttatcaaagaagcatacgc
caaatatctcaacgatgtaagagacgggaaaatagttccattatctaaagctttagaggcggactatgtggaatccat
gttatccaacttgacaaatcttaatatccgagagatagaagaacatatgagacaaacgctgatagatgatccagata
ataacctcctgaaaatggccaaagcgggttataaagtaaatcctacagaactaatgtatattctaggtacgtatggaca
acaaaggattgatggtgaaccagcagagactcgagtattgggtagagtcttaccttactatcttccagactctaaggat
ccagaaggaagaggttacattcttaattctttaacaaaaggattaacaggttctcaatattacttttcgatgctggttgcaa
gatctcaatctactgatatcgtctgtgaaacatcacgtaccggaacactggctagaaaaatcattaaaaagatggagg
atatggtggtcgacggatacggacaagtagttataggtaatacgctcatcaagtacgccgccaattataccaaaattct
aggctcagtatgtaaacctgtagatcttatctatccagatgagtccatgacttggtatttggaaattagtgctctgtggaat
aaaataaaacagggattcgtttactctcagaaacagaaacttgcaaagaagacattggcgccgtttaatttcctagtatt
cgtcaaacccaccactgaggataatgctattaaggttaaggatctgtacgatatgattcataacgtcattgatgatgtga
gagagaaatacttctttacggtatctaatatagattttatggagtatatattcttgacgcatcttaatccttctagaattagaat
tacaaaagaaacggctatcactatctttgaaaagttctatgaaaaactcaattatactctaggtggtggaactcctattgg
aattatttctgcacaggtattgtctgagaagtttacacaacaagccctgtccagttttcacactactgaaaaaagtggtgc
cgtcaaacaaaaacttggtttcaacgagtttaataacttgactaatttgagtaagaataagaccgaaattatcactctgg
tatccgatgatatctctaaacttcaatctgttaagattaatttcgaatttgtatgtttgggagaattaaatccagacatcactct
tcgaaaagaaacagataggtatgtagtagatataatagtcaatagattatacatcaagagagcagaaattaccgaat
tagtcgtcgaatatatgattgaacgattcatctcctttagcgtcattgtaaaggaatggggtatggaaacattcattgagg
acgaggataatattagatttactgtctatctaaatttcgttgaaccagaggaattgaatcttagtaagtttatgatggttcttc
cgggggcagccaacaagggaaagattagtaaattcaagattcctatctctgattatacgggttatgacgacttcaatca
aacaaaaaagctcaataagatgactgtagaactcatgaatctaaaagaattaggttctttcgatttggaaaacgtcaa
cgtgtatcctggagtatggaatacatacgatatcttcggtatcgaggccgctcgtgaatacttgtgcgaagccatgttaa
acacctatggagaagggttcgattatctgtatcagccttgtgatcttctcgctagtttactatgtgctagttacgaaccaga
atcagtgaataaattcaagttcggcgcagctagtactcttaagagagctacgttcggagacaataaagcattgttaaac
gcggctcttcataaaaagtcagaacctattaacgataatagtagctgccacttttttagcaaggtccctaatataggaac
tggatattacaaatactttatcgacttgggtcttctcatgagaatggaaaggaaactatctgataagatatcttctcaaaa
gatcaaggaaatggaagaaacagaagacttttaattcttatcaataacatatttttctatgatctgtcttttaaacgatggat
tttccacaaatgcgcctctcaagtccctcatagaatgatacacgtataaaaaatatagcataggcaatgactccttattttt
agacattagatatgccaaaatcatagccccgcttctatttactcccgcagcacaatgaaccaacacgggctcgtttcgtt
gatcacatttagataaaaaggcggttacgtcgtcaaaatatttactaatatcggtagttgtatcatctaccaacggtatat
gaataatattaatattagagttaggtaatgtatatttatccatcgtcaaatttaaaacatatttgaacttaacttcagatgatg
gtgcatccatagcatttttataatttcccaaatacacattattggttacccttgtcattatagtgggagatttggctctgtgcat
atctccagttgaacgtagtagtaagtatttatacaaacttttcttatccatttataacgtacaaatggataaaactactttatc
ggtaaacgcgtgtaatttagaatacgttagagaaaaggctatagtaggcgtacaagcagccaaaacatcaacactt
atattctttgttattatattggcaattagtgcgctattactctggtttcagacgtctgataatccagtctttaatgaattaacgag
atatatgcgaattaaaaatacggttaacgattggaaatcattaacggatagcaaaacaaaattagaaagtgatagag
gtagacttctagccgctggtaaggatgatatattcgaattcaaatgtgtggatttcggcgcctattttatagctatgcgattg
gataagaaaacatatctgccgcaagctattaggcgaggtactggagacgcgtggatggttaaaaaggcggcaaag
gtcgatccatctgctcaacaattttgtcagtatttgataaaacacaagtctaataatgttattacttgtggtaatgagatgtta
aatgaattaggttatagcggttattttatgtcaccgcattggtgttccgattttagtaatatggaatagtgttagataaatgcg
gtaacgaatgttcctgtaaggaaccataacagtttagatttaacgttaaagatgagcataaacataataaacaaaatta
caatcaaacctataacattaatatcaaacaatccaaaaaatgaaatcagtggagtagtaaacgcgtacataactcct
ggataacgtttagtagctgccgttcctattctagaccaaaaattcggtttcatgttttcgaaacggtgttctgcaacaagtc
ggggatcgtgttctacatatttggcggcattatccagtatctgcctattgatcttcatttcgttttcaattctggctatttcaaaat
aaaatcccgatgatagacctccagactttataatttcatctacgatgttcagcgccgtagtaactctaataatataggctg
ataagctaacatcataccctcctgtatatgtgaatatggcatgatttttgtccattacaagctcggttttaactttattgcctgt
aataatttctctcatctgtaggatatctatttttttgtcatgcattgccttcaagacgggacgaagaaacgtaatatcctcaat
aacgttatcgttttctacaataactacatattctacctttttattttctaactcggtaaaaaaattagaatcccatagggctaa
atgtctagcgatatttcttttcgtttcctctgtacacatagtgttacaaaaccctgaaaagaagtgagtatacttgtcatcattt
ctaatgtttcctccagtccactgtataaacgcataatccttgtaatgatctggatcatccttgactaccacaacatttctttttt
ctggcataacttcgttgtcctttacatcatcgaacttctgatcattaatatgctcatgaacattaggaaatgtttctgatggaa
gtctatcaataactggcacaacaataacaggagttttcgccgccgccatttagttattgaaattaatcatatacaactcttt
aatacgagttatattttcgtctatccattgtttcacatttacatatttcgacaaaaagatataaaatgcgtattccaatgcttct
ctgtttaatgaattactaaaatatacaaacacgtcactgtctggcaataaatgatatcttagaatattgtaacaatttattttg
tattgcacatgttcgtgatctatgagttcttcttcgaatggcataggatctccgaatctgaaaacgtataaataggagttag
aataataatatttgagagtattggtaatatataaactctttagcggtataattagtttttttctctcaatttctatttttagatgtgat
ggaaaaatgactaattttgtagcattagtatcatgaactctaatcaaaatcttaatatcttcgtcacacgttagctctttgaa
gtttttaagagatgcatcagttggttcgaccgatggagtaggtgcaacaattttttgttcgatgtatgtatgtactggagcca
ttgttttaactataatggtgcttgtatcgaaaaactttaatgcagatagcggaagctcttcgccgcgactttctacatcgtaa
ttgggttctaacgccgatctctgaatggatactagttttctaagttctaatgtgattctctgaaaatgtaaatccaattcctcc
ggcattatagatgtgtatacatcggtaaataaaactatagtatccaacgatcccttctcgcaaattctagtcttaaccaaa
aaatcgtatataaccacggagatggcgtatttaagagtggattcttctaccgttttgttcttggatgtcatataggaaactat
aaagtccgcactactgttaagaatgattactaacgcaactatatagttcaaattaagcattttggaaacataaaataact
ctgtagacgatacttgactttcgaataagtttgcagacaaacgaagaaagaacagacctctcttaatttcagaagaaa
actttttttcgtattcctgacgtctagagtttatatcaataagaaagttaagaattagtcggttaatgttgtatttcattacccaa
gtttgagatttcataatattatcaaaagacatgataatattaaagataaagcgctgactatgaacgaaatagctatatgg
ttcgctcaaaaatatagtcttgttaaacgtggaaacgataactgtatttttaatcacgtcagcggcatctaaattaaatata
ggtatatttattccacacactctacaatatgccacaccatcttcataataaataaattcgttagcaaaattattaattttagtg
aaatagttagcgtcaactttcatagcttccttcaatctaatttgatgctcacacggtgcgaattccactctaacatcccttttc
catgcctcaggttcatcgatctctataatatctagttttttgcgtttcacaaacacaggctcgtctctcgcgatgagatctgta
tagtaactatgtaaatgataactagatagaaagatgtagctatatagatgacgatcctttaagagaggtataataacttt
accccaatcagatagactgttgttatggtcttcggaaaaagaatttttataaatttttccagtattttccaaatatacgtactta
acatctaaaaaatccttaatgataataggaatggataatccgtctattttataaagaaatacatatcgcacattatacttttt
tttggaaatgggaataccgatgtgtctacataaatatgcaaagtctaaatattttttagagaatcttaattggtccaaattctt
ttccaagtacggtaatagatttttcatattgaacggtatcttcttaatctctggttctagttccgcattaaatgatgaaactaag
tcactatttttataactaacgattacatcacctctaacatcatcatttaccagaatactgatcttcttttgtcgtaaatacatgtc
taatgtgttaaaaaaaagatcatacaagttatacgtcatttcatctgtggtattcttgtcattgaaggataaactcgtactaa
tctcttctttaacagcctgttcaaatttatatcctatatacgaaaaaatagcaaccagtgtttgatcatccgcgtcaatattct
gttctatcgtagtgtataacaatcgtatatcttcttctgtgatagtcgatacgttataaaggttgataacgaaaatatttttattt
cgtgaaataaagtcatcgtaggattttggacttatattcgcgtctagtagatatgcttttatttttggaatgatctcaattagaa
tagtctctttagagtccatttaaagttacaaacaactaggaaattggtttatgatgtataatttttttagtttttatagattctttatt
ctatacttaaaaaatgaaaataaatacaaaggttcttgagggttgtgttaaattgaaagcgagaaataatcataaattat
ttcattatcgcgatatccgttaagtttgtatcgtaatggcgtggtcaattacaaataaagcggatactagtagcttcacaaa
gatggctgaaatcagagctcatctaaaaaatagcgctgaaaataaagataaaaacgaggatattttcccggaagat
gtaataattccatctactaagcccaaaaccaaacgagccactactcctcgtaaaccagcggctactaaaagatcaac
caaaaaggaggaagtggaagaagaagtagttatagaggaatatcatcaaacaactgaaaaaaattctccatctcct
ggagtcagcgacattgtagaaagcgtggccgctgtagagctcgatgatagcgacggggatgatgaacctatggtac
aagttgaagctggtaaagtaaatcatagtgctagaagcgatctctctgacctaaaggtggctaccgacaatatcgttaa
agatcttaagaaaattattactagaatctctgcagtatcgacggttctagaggatgttcaagcagctggtatctctagaca
atttacttctatgactaaagctattacaacactatctgatctagtcaccgagggaaaatctaaagttgttcgtaaaaaagtt
aaaacttgtaagaagtaaatgcgtgcacttttttataaagatggtaaactctttaccgataataattttttaaatcctgtatca
gacgataatccagcgtatgaggttttgcaacatgttaaaattcctactcatttaacagatgtagtagtatatgaacaaac
gtgggaggaggcgttaactagattaatttttgtgggaagtgattcaaaaggacgtagacaatacttttacggaaaaatg
catgtacagaatcgcaacgctaaaagagatcgtatttttgttagagtatataacgttatgaaacgaattaattgttttataa
acaaaaatataaagaaatcgtccacagattccaattatcagttggcggtttttatgttaatggaaactatgttttttattagat
ttggtaaaatgaaatatcttaaggagaatgaaacagtagggttattaacactaaaaaataaacacatagaaataagt
cccgatgaaatagttatcaagtttgtaggaaaggacaaagtttcacatgaatttgttgttcataagtctaatagactatata
agccgctattgaaactgacggatgattctagtcccgaagaatttctgttcaacaaactaagtgaacgaaaggtatatga
atgtatcaaacagtttggtattagaatcaaggatctccgaacgtatggagtcaattatacgtttttatataatttttggacaa
atgtaaagtccatatctcctcttccatcaccaaaaaagttaatagcgttaactatcaaacaaactgctgaagtggtaggt
catactccatcaatttcaaaaagagcttatatggcaacgactattttagaaatggtaaaggataaaaattttttagatgta
gtatctaaaactacgttcgatgaattcctatctatagtcgtagatcacgttaaatcatctacggatggatgatatagatcttt
acacaaataattacaaaaccgataaatggaaatggataagcgtatgaaatctctcgcaatgaccgctttctttgggga
gctaagcacattagatattatggcattgataatgtctatatttaaacgccatccaaacaataccattttttcagtggataag
gatggtcagtttatgattgatttcgaatacgataattataaggcttctcaatatttggatctgaccctcactccgatatctgga
gatgaatgcaagactcacgcatcgagtatagccgaacaattggcgtgtgtggatattattaaagaggatattagcgaa
tatatcaaaactactccccgtcttaaacgatttataaaaaaataccgcaatagatcagatactcgcatcagtcgagata
cagaaaagcttaaaatagctctagctaaaggcatagattacgaatatataaaagacgcttgttaataagtaaatgaaa
aaaaactagtcgtttataataaaacacgatatggatgccaacgtagtatcatcttctactattgcgacgtatatagacgct
ttagcgaagaatgcttcggaattagaacagaggtctaccgcatacgaaataaataatgaattggaactagtatttatta
agccgccattgattactttgacaaatgtagtgaatatctctacgattcaggaatcgtttattcgatttaccgttactaataag
gaaggtgttaaaattagaactaagattccattatctaaggtacatggtctagatgtaaaaaatgtacagttagtagatgc
tatagataacatagtttgggaaaagaaatcattagtgacggaaaatcgtcttcacaaagaatgcttgttgagactatcg
acagaggaacgtcatatatttttggattacaagaaatatggatcctctatccgactagaattagtcaatcttattcaagca
aaaacaaaaaactttacgatagactttaagctaaaatattttctaggatccggtgcccagtctaaaagttctttattacac
gctattaatcatccaaagtcaaggcctaatacatctctggaaatagaatttacacctagagacaatgaaacagttccat
atgatgaactaataaaggaattgacgactctctcgcgtcatatatttatggcttctccagagaatgtaattctttctccgcct
attaacgcgcctataaaaacctttatgttgcctaaacaagatatagtaggtttggatctggaaaatctatatgccgtaact
aagactgacggcattcctataactatcagagttacatcaaacgggttgtattgttattttacacatcttggttatattattaga
tatcctgttaagagaataatagattccgaagtagtagtctttggtgaggcagttaaggataagaactggaccgtatatct
cattaagctaatagagcctgtgaatgcaatcaatgatagactagaagaaagtaagtatgttgaatctaaactagtggat
atttgtgatcggatagtattcaagtcaaagaaatacgaaggtccgtttactacaactagtgaagtcgtcgatatgttatct
acatatttaccaaagcaaccagaaggtgttattctgttctattcaaagggacctaaatctaacattgattttaaaattaaa
aaggaaaatactatagaccaaactgcaaatgtagtatttaggtacatgtccagtgaaccaattatctttggagagtcgt
ctatctttgtagagtataagaaatttagcaacgataaaggctttcctaaagaatatggttctggtaagattgtgttatataac
ggcgttaattatctaaataatatctattgtttggaatatattaatacacataatgaagtgggtattaagtccgtggttgtacct
attaagtttatagcagaattcttagttaatggagaaatacttaaacctagaattgataaaaccatgaaatatattaactca
gaagattattatggaaatcaacataatatcatagtcgaacatttaagagatcaaagcatcaaaataggagatatcttta
acgaggataaactatcggatgtgggacatcaatacgccaataatgataaatttagattaaatccagaagttagttatttt
acgaataaacgaactagaggaccgttgggaattttatcaaactacgtcaagactcttcttatttctatgtattgttccaaaa
catttttagacgattccaacaaacgaaaggtattggcgattgattttggaaacggtgctgacctggaaaaatacttttatg
gagagattgcgttattggtagcgacggatccggatgctgatgctatagctagaggaaatgaaagatacaacaaatta
aactctggaattaaaaccaagtactacaaatttgactacattcaggaaactattcgatccgatacatttgtctctagtgtc
agagaagtattctattttggaaagtttaatatcatcgactggcagtttgctatccattattcttttcatccgagacattatgcta
ccgtcatgaataacttatccgaactaactgcttctggaggcaaggtattaatcactaccatggacggagacaaattatc
aaaattaacagataaaaagacttttataattcataagaatttacctagtagcgaaaactatatgtctgtagaaaaaata
gctgatgatagaatagtggtatataatccatcaacaatgtctactccaatgactgaatacattatcaaaaagaacgata
tagtcagagtgtttaacgaatacggatttgttcttgtagataacgttgatttcgctacaattatagaacgaagtaaaaagttt
attaatggcgcatctacaatggaagatagaccatctacaagaaactttttcgaactaaatagaggagccattaaatgt
gaaggtttagatgtcgaagacttacttagttactatgttgtttatgtcttttctaagcggtaaataataatatggtatgggttct
gatctcccagttctaaatgcattaaataattccaatagagcgatttttgttcctataggaccttccaactgtggatactctgt
attgttaatagatatattaatacttttgtcgggtaacagaggttctacgtcttttaaaaataaaagtttgataacatctggcct
gttcataaataaaaacttggcgattctatatatactcttattatcaaatctagccattgtcttatagatgtgagctactgtagg
tgtaccatttgattttctttctaatactatatatttctctcgaagaagttcttgcacatcatctgggaataaaatactactgttga
gtaaatcagttattttttttatatcgatattgatggacatttttatagttaaggataataagtatcccaaagtagataacgacg
ataacgaagtatttatacttttaggaaatcacaatgactttatcagattaaaattaacaaaattaaaggagcatgtatttttt
tctgaatatattgtgactccagatacatatggatctttatgcgtcgaattaaatgggtctagttttcagcacggcggtagat
atatagaggtggaggaatttatagatgctggaagacaagttagatggtgttctacatccaatcatatatctaaagatata
cccgaagatatgcacactgataaatttgtcatttatgatatatacacttttgacgctttcaagaataaacgattggtattcgt
acaggtacctccgtcgttaggagatgatagtcatttgactaatccgttattgtctccgtattatcgtaattcagtagccaga
caaatggtcaatgatatgatttttaatcaagattcatttttaaaatatttattagaacatctgattagaagccactatagagttt
ctaaacatataacaatagttagatacaaggataccgaagaattaaatctaacgagaatatgttataatagagataagt
ttaaggcgtttgtattcgcttggtttaacggcgtttcggaaaatgaaaaggtactagatacgtataaaaaggtatctaattt
gatataatgaattcagtgactgtatcacacgcgccatatactattacttatcacgatgattgggaaccagtaatgagtca
attggtagagttttataacgaagtagccagttggctgctacgagacgagacgtcgcctattcctgataagttctttataca
gttgaaacaaccgcttagaaataaacgagtatgtgtgtgcggtatagatccgtatccgaaagatggaactggtgtacc
gttcgaatcaccaaattttacaaaaaaatcaattaaggagatagcttcatctatatctagattaaccggagtaattgatta
taaaggttataaccttaatataatagacggggttataccctggaattattacttaagttgtaaattaggagaaacaaaaa
gtcacgcgatctactgggataagatttccaagttactgctgcagcatataactaaacacgttagtgttctttattgtttgggt
aaaacagatttctcgaatatacgggccaagttagaatccccggtaactaccatagtcggatatcatccagcggctaga
gaccgccaattcgagaaagatagatcatttgaaattatcaacgttttactggaattagacaacaaggcacctataaatt
gggctcaagggtttatttattaatgctttagtgaaattttaacttgtgttctaaatggatgcggctattagaggtaatgatgtta
tctttgttcttaagactataggtgtcccgtcagcgtgcagacaaaatgaagatccaagatttgtagaagcatttaaatgcg
acgagttagaaagatatattgagaataatccagaatgtacactattcgaaagtcttagggatgaggaagcatactctat
agtcagaattttcatggatgtagatttagacgcgtgtctagacgaaatagattatttaacggctattcaagattttattatcg
aggtgtcaaactgtgtagctagattcgcgtttacagaatgcggcgccattcatgaaaatgtaataaaatccatgagatct
aatttttcattgactaagtctacaaatagagataaaacaagttttcatattatctttttagacacgtataccactatggatac
attgatagctatgaaacgaacactattagaattaagtagatcatctgaaaatccactaacaagatcgatagacactgc
cgtatataggagaaaaacaactcttcgggttgtaggtactaggaaaaatccaaattgcgacactattcatgtaatgca
accaccgcatgataatatagaagattacctattcacttacgtggatatgaacaacaatagttattacttttctctacaaca
acgattggaggatttagttcctgataagttatgggaaccagggtttatttcattcgaagacgctataaaaagagtttcaaa
aatattcattaattctataataaactttaatgatctcgatgaaaataattttacaacggtaccactggtcatagattacgtaa
caccttgtgcattatgtaaaaaacgatcgcataaacatccgcatcaactatcgttggaaaatggtgctattagaatttac
aaaactggtaatccacatagttgtaaagttaaaattgttccgttggatggtaataaactgtttaatattgcacaaagaatttt
agacactaactctgttttattaaccgaacgaggagaccatatagtttggattaataattcatggaaatttaacagcgaag
aacccttgataacaaaactaattttgtcaataagacatcaactacctaaggaatattcaagcgaattactctgtccaag
aaaacgaaagactgtagaagctaacatacgagacatgttagtagattcagtagagaccgatacctatccggataaa
cttccgtttaaaaatggtgtattggacctggtagacggaatgttttactctggagatgatgctaaaaaatatacgtgtactg
tatcaaccggatttaaatttgacgatacaaagttcgtcgaagacagtccagaaatggaagagttaatgaatatcattaa
cgatatccaaccattaacggatgaaaataagaaaaatagagagctatatgaaaaaacattatctagttgtttatgcggt
gctaccaaaggatgtttaacattcttttttggagaaactgcaactggaaagtcgacaaccaaacgtttgttaaagtctgct
atcggtgacctgtttgttgagacgggtcaaacaattttaacagatgtattggataaaggacctaatccatttatcgctaac
atgcatttgaaaagatctgtattctgtagcgaactacctgattttgcctgtagtggatcaaagaaaattagatctgacaat
attaaaaagttgacagaaccttgtgtcattggaagaccgtgtttctccaataaaattaataatagaaaccatgcgacaa
tcattatcgatactaattacaaacctgtttttgataggatagataacgcattaatgagaagaattgccgtcgtgcgattca
gaacacacttttctcaaccttctggtagagaggctgctgaaaataatgacgcgtacgataaagtcaaactattagacg
aggggttagatggtaaaatacaaaataatagatatagattcgcatttctatacttgttggtgaaatggtacagaaaatat
catgttcctattatgaaactatatcctacacccgaagagattcctgactttgcattctatctcaaaataggtactctgttagta
tctagctctgtaaagcatattccattaatgacggacctctccaaaaagggatatatattgtacgataatgtggtcactcttc
cgttgactactttccaacagaaaatatccaagtattttaattctagactatttggacacgatatagagagcttcatcaatag
acataagaaatttgccaatgttagtgatgaatatctgcaatatatattcatagaggatatttcatctccgtaaatatatgctc
atatatttatagaagatatcacatatctaaatgaataccggaatcatagatttatttgataatcatgttgatagtataccaac
tatattacctcatcagttagctactctagattatctagttagaactatcatagatgagaacagaagcgtgttattgttccatat
tatgggatcaggtaaaacaataatcgctttgttgttcgccttggtagcttccagatttaaaaaggtttacattctagtgccta
atatcaacattttgaaaatttttaattataatatgggtgtagctatgaacttgtttaatgacgaattcatagctgagaatatctt
tattcattccacaacaagtttttattctcttaattataacgataacgtcattaattataacggattatctcgctacaataactct
atttttatcgttgatgaggcacataatatctttgggaataatactggagaacttatgaccgtgataaaaaataaaaacaa
gattccttttctactattgtctggatctcccattactaacacacctaatactctgggtcatattatagatttaatgtccgaagag
acgatagattttggtgagattattagtcgtggtaagaaagtaattcagacacttcttaacgaacgcggtgtgaatgtactt
aaggatttgcttaaaggaagaatatcatattacgaaatgcctgataaagatctaccaacgataagatatcacggacgt
aagtttctagatactagagtagtatattgtcacatgtctaaacttcaagagagagattatatgattactagacgacagcta
tgttatcatgaaatgtttgataaaaatatgtataacgtgtcaatggcagtattgggacaacttaatctgatgaataatttag
atactttatttcaggaacaggataaggaattgtacccaaatctgaaaataaataatggcgtgttatacggagaagaatt
ggtaacgttaaacattagttccaaatttaaatactttattaatcggatacagacactcaacggaaaacattttatatactttt
ctaattctacatatggcggattggtaattaaatatatcatgctcagtaatggatattctgaatataatggttctcagggaact
aatccacatatgataaacggcaaaccaaaaacatttgctatcgttactagtaaaatgaaatcgtctttagaggatctatt
agatgtgtataattctcctgaaaacgatgatggtagtcaattgatgtttttgttttcgtcaaacattatgtccgaatcctatact
ctgaaagaggtaaggcatatttggtttatgactatcccagatactttttctcaatacaaccaaattcttggacgatctattag
aaaattctcttacgccgatatttctgaaccagttaatgtatatcttttagccgccgtatattccgatttcaatgacgaagtaa
cgtcattaaacgattacacacaggatgaattgattaatgttttaccatttgacatcaaaaagctgttatatctaaaatttaa
gactaaagaaacgaatagaatatactctattcttcaagagatgtctgaaacgtattctcttccaccacatccatcaattgt
aaaagttttattgggagaattggtcagacaatttttttataataattctcgtattaagtataacgactccaagttacttaaaat
ggttacatcagttataaaaaataaagaagacgctaggaattacatagatgatattgtaaacggtcacttctttgtatcga
ataaagtatttgataaatctcttttatacaaatacgaaaacgatattattacagtaccgtttagactttcctacgaaccatttg
tttggggagttaactttcgtaaagaatataacgtggtatcttctccataaaactgatgaaatatataaagaaataaatgtc
gagctttgttaccaatggataccttccagttacattggaaccacacgagctgacgttagacataaaaactaatattagg
aatgccgtatataagacgtatctccatagagaaattagtggtaaaatggccaagaaaatagaaattcgtgaagacgt
ggaattacctctcggcgaaatagttaataattctgtagttataaacgttccgtgtgtaataacctacgcgtattatcacgttg
gggatatagtcagaggaacattaaacatcgaagatgaatcaaatgtaactattcaatgtggagatttaatctgtaaact
aagtagagattcgggtactgtatcatttagcgattcaaagtactgcttttttcgaaatggtaatgcgtatgacaatggcag
cgaagtcactgccgttctaatggaggctcaacaaggtatcgaatctagttttgtttttctcgcgaatatcgtcgactcataa
aaaagagaatagcggtaagtataaacacgaatactatggcaataattgcgaatgttttattctcttcgatatatttttgata
atatgaaaaacatgtctctctcaaatcggacaaccatctcataaaatagttctcgcgcgctggagaggtagttgctgctc
gtataatctccccagaataatatacttgcgtgtcgtcgttcaatttatacggatttctatagttctctgttatataatgcggttttc
catcatgattagacgacgacaatagtgttctgaatttagatagttgatcagaatgaatgtttattggcgttggaaaaattat
ccatacagcgtctgcagagtggttgatagttgttcctagatatgtaaaataatccaacttactaggcagcaaattgtctag
ataaaatactgaatcaaacggtgcagacgtattggcggatctaatggaatccaattgattaactatcttttgaaaatata
catttttatgatccaatacttgtaagaatatagaaataatgataagtccatcatcgtgtttttttgcctcttcataagaactata
ttttttcttattccaatgaacaagattaatctctccagagtatttgtacacatctatcaagtgattggatccataatcgtcttcct
ttccccaatatatatgtagtgatgataacacatattcattggggagaaaccctccacttatatatcctcctttaaaattaatc
cttactagttttccagtgttctggatagtggttggtttcgactcattataatgtatgtctaacggcttcaatcgcgcgttagaaa
ttgcttttttagtttctatattaataggagatagttgttgcggcatagtaaaaatgaaatgataactgtttaaaaatagctctta
gtatgggaattacaatggatgaggaagtgatatttgaaactcctagagaattaatatctattaaacgaataaaagatatt
ccaagatcaaaagacacgcacgtgtttgctgcgtgtataacaagtgacggatatccgttaataggagctagaagaac
ttcattcgcgttccaggcgatattatctcaacaaaattcagattctatctttagagtatccactaaactattacggtttatgta
ctacaatgaactaagagaaatctttagacggttgagaaaaggttctatcaacaatatcgatcctcactttgaagagtta
atattattgggtggtaaactagataaaaaggaatctattaaagattgtttaagaagagaattaaaagaggaaagtgat
gaacgtataacagtaaaagaattcggaaatgtaattctaaaacttacaacgcgcgataaattatttaataaagtatatat
aggttattgcatggcgtgttttattaatcaatcgttggaggatttatcgcatactagtatttacaatgtagaaattagaaaga
ttaaatcattaaatgattgtattaacgacgataaatacgaatatctgtcttatatttataatatgctagttaatagtaaatgaa
cttttacagatctagtataattagtcagattattaagtataatagacgactagctaagtctattatttgcgaggatgactctc
aaattattacactcacggcattcgttaaccaatgcctatggtgtcataaacgagtatccgtgtccgctattttattaactact
gataacaaaatattagtatgtaacagacgagatagttttctctattctgaaataattagaactagaaacatgtttagaaa
gaaacgattatttctgaattattccaattatttgaacaaacaggaaagaagtatactatcgtcatttttttctctagatccagc
tactgctgataatgatagaatagacgctatttatccgggtggcatacccaaaaggggtgagaatgttccagagtgtttat
ccagggaaattaaagaagaagttaatatagacaattcttttgtattcatagacactcggttttttattcatggcatcataga
agataccattattaataaattttttgaggtaatcttctttgtcggaagaatatctctaacgagtgatcaaatcattgatacattt
aaaagtaatcatgaaatcaaggatctaatatttttagatccgaattcaggtaatggactccaatacgaaattgcaaaat
atgctctagatactgcaaaactcaaatgttatggccatagaggatgttattacgaatcattaaaaaaattaactgaggat
gattgattagaaaatataaattaatttaccatcgtgtatttttataacgggattgtccggcatatcatgtagatagttaccgtc
tacatcgtatactcgaccatctacgcctttaaatcctctatttattgacattaatctattagaattggaataccaaatattagt
accctcaattagtttattggtaatatttttgttagacgatagatcgatggctcttgaaaccaaggttttccaaccggactcatt
gtcgatcggtgagaagtctttttcattagcatgaatccattctaatgatgtatgtttaaacactctaaacaattggacaaatt
cttttgatttgctttgaatgatttcaaataggtcttcgtctacagtaggcataccattagataatctagccattataaagtgca
cgtttacatatctacgttctggaggagtaagaacgtgactattgagacgaatggctcttcctactatctgacgaagagac
gcctcgttccatgtcatatctaaaatgaagatatcattgattgagaagaagctaataccctcgcctccactagaagaga
atacgcatgttttaatgcattctccgttagtgtttgattcttggttaaactcagccaccgccttgattctagtatcttttgttctag
atgagaactctatattagagataccaaagactttgaaatatagtaataagatttctattcctgactgattaacaaatggttc
aaagactagacatttaccatgggatgctaatattcccaaacatacatctataaatttgacgcttttctcttttaattcagtaa
atagagagatatcagccgcactagcatcccctcccaatagttctccccttttaaaggtatctaatgcagatttagaaaatt
ctctatctcttaatgaatttttaaaatcattatatagtgttgctatctcttgcgcgtattcgcccggatcacgattttgtctttcag
gaaagctatcgaacgtaaacgtagtagccatacgtctcagaattctaaatgatgatatacctgtttttatttcagcgagttt
agccttttgataaatttcttcttgctttttcgacatattaacgtatcgcattaatactgttttcttagcgaatgatgcagacccttc
tacgtcatcaaaaatagaaaactcgttattaactatgtacgaacataggcctcctagtttggagactaattctttttcatca
actagacgtttattctcaaatagcgattggtgttgtaaggatcctggtcgtagtaagttaaccaacatggtgaattcttgca
cactattgacgataggtgtagccgataaacaaatcatcttatggttttttaatgcgatggtcttagataaaaaattatatact
gaacgagtaggacggatcttaccatcttctttgattaatgatttagaaatgaagttatgacattcatcaataatgacgcat
attctactcttggaattaatagttttgatattagtaaaaaatttatttctaaaattttgatcatcgtaattaataaaaatacaatc
cttcgttatctctggagcgtatctgagtatagtgttcatccaaggatcttctatcaaagcctttttcaccaataagataatag
cccaattcgtataaatatccttaagatgtttgagaatatatacagtagtcattgttttaccgacacccgtttcatggaacaat
aaaagagaatgcatactgtctaatcctaagaaaactcttgctacaaaatgttgataatccttgaggcgtactacgtccg
accccatcatttcaacaggcatattagtagttctgcgcaatgcataatcgatataggccgcgtgtgatttactcatttatga
gtgataagtaataactatgttttaaaaatcacagcagtagtttaactagtcttctctgatgtttgttttcgatactttttgaatca
gaagtcatactagaataaagcaacgagtgaacgtaatagagagcttcgtatactctattcgaaaactctaagaactta
ttaatgaattccgtatccactggattgtttaaaatactaaattgaacactgttcacatccttccaagaagaagacttagtga
cggacttaacatgagacataaataaatccaaattttttttacaaacatcactagccaccataatggcgctatcttttaacc
agctatcgcttacgcattttagcagtctaacatttttaaagagactacaatatattctcatagtatcgattacacctctaccg
aataaagttggaagtttaataatacaatatttttcgtttacaaaatcaaataatggtcgaaacacgtcgaaggttaacatc
ttataatcgctaatgtatagattgttttcagtgagatgattattagatttaatagcatctcgttcacgtttgaacagtttattgcgt
gcgctgaggtcggcaactacggcgtccgctttagtactcctcccataatactttacgctattaatctttaaaatttcataga
ctttatctagatcgctttctggtaacatgatatcatgtgtaaaaagttttaacatgtcggtcggcattctatttagatcattaact
ctagaaatctgaagaaagtaattagctccgtattccagactaggtaatgggcttttacctagagacagattaagttctgg
caatgtttcataaaatggaagaaggacatgcgttccctcccggatattttttacaatttcatccatttacaactctatagtttg
ttttcattattattagttattatctcccataatcttggtaatacttaccccttgatcgtaagataccttatacaggtcattacatac
aactaccaattgtttttgtacataatagattggatggttgacatccatggtggaataaactactcgaacagatagtttatctt
tccccctagatacattagccgtaatagttgtcggcctaaagaatatctttggtgtaaagttaaaagttagggttcttgttcca
ttattgctttttgtcagtagttcattataaattctcgagatgggtccgttctctgaatatagaacatcatttccaaatctaacttct
agtctagaaataatatcggtcttattcttaaaatctattcccttgatgaagggatcgttaatgaacaaatccttggcctttgat
tcggctgatctattatctccgttatagacgttacgttgactagtccaaagacttacaggaatagatgtatcgatgatgttgat
actatgtgatatgtgagcaaagattgttctcttagtggcatcactatatgttccagtaatggcggaaaactttttagaaatgt
tatatataaaagaattttttcgtgttccaaacattagcagattagtatgaagataaacactcatattatcaggaacattatc
aatttttacatacacatcagcatcttgaatagaaacgataccatcttctggaacctctacgatctcggcagactccggat
aaccagtcggtggaccatcgctaacaataactagatcatccaacaatctactcacatatgcatctatataatctttttcat
cttgtgagtaccctggatacgaaataaatttattatccgtatttccataataaggtttagtataaacagagagcgatgttgc
cgcatgaacttcagttacagtcgccgttggttggtttatttgacctattactctcctaggtttctctataaatgatggtttaatttg
tacattcttaaccatatatccaataaagctcaattcaggaacataaacaaattctttgttgaacgtttcaaagtcgaacga
agagtcacgaataacgatatcggatactggattgaaggttaccgttacggtaatttttgaatcggatagtttaagactgct
gaatgtatcttccacatcaaacggagttttaatataaacgtatactgtagatggttctttaatagtgtcattaggagttaggc
caatagaaatatcattaagttcactagaatatccagagtgtttcaaagcaattgtattattgatacaattattatataattctt
cgccctcaatttcccaaataacaccgttacacgaagagatagatacgtgattaatacatttatatccaacatatggtacg
taaccgaatcttcccatacctttaacttctggaagttccaaactcagaaccaaatgattaagcgcagtaatatactgatc
cctaatttcgaagctagcgatagcctgattgtctggaccatcgtttgtcataactccggatagagaaatatattgcggcat
atataaagttggaatttgactatcgactgcgaagacattagaccgtttaatagagtcatccccaccgatcaaagaatta
atgatagtattattcattttctatttaaaatggaaaaagcttacaataaactccgtagagaaatatctataatttgtgagttttc
cttaaagtaacagcttccgtaaacgccgtctttatctcttagtaagtttattgtatttataaccttttccttatcttcatagaatac
taaaggcaacaaagaaatttttggttcttctctaagagctacgtgagacttaaccatagacgccaacgaatccctacat
attttagaacagaaatacccaacttcaccacccttgaatgtctcaatactaataggtttaaaaaccaaatcttgattaca
aaaccaacacttatcaattacactatttgtcttaatagacacatctgccatagatttataatactttggtagtatacaagcg
agtgcttcttctttagcgggcttaaagactgctttaggtgctgaaataaccacatctggaaggcttactcgcttagccattt
aattacggaactatttttttatacttctaatgagcaagtagaaaacctctcatctacaaaaacatactcgtgtccataatcc
tctaccatagttacacgttttttagatctcatatgtgctaaaaagttttcccatactaattggttactattatttttcgtataattttta
acagtttgaggttttagatttttagttacagaagtgatatcgaatattttatccaaaaagaatgaataattaattgtcttagaa
ggagtgttttcttggcaaaagaataccaagtgcttaaatatttctactacttcattaatcttttctgtactcagattcagtttctc
atcttttacttgattgattatttcaaagactaacttataatcctttttatttattctctcgttagccttaagaaaactagatacaaa
atttgcatctacatcatccgtggatatttgatttttttccatgatatccaagagttccgagataatttctccagaacattgatga
gacaataatctccgcaatacatttctcaaatgaataagtttattagacacatggaagtttgactttttttgtacctttgtacattt
ttgaaataccgactcgcaaaaaatacaatattcatatccttgttcagatactataccgttgtgtctacaaccgctacataat
cgtagattcatgttaacactctacgtatctcgtcgtccaatattttatataaaaacattttatttctagacgttgccagaaaat
cctgtaatatttttagttttttgggctgtgaataaagtatcgccctaatattgttaccgtcttccgccaatatagtagttaaattat
ccgcacatgcaaaagaacaccgcttaggcggattcagtacaatgttatatttttcgtaccaactcatttaaatatcataat
ctaaaatagttctgtaatatgtctagcgctaatatattgatcataatcctgtgcataaattaagatacaacaatgtctcgaa
atcatcgacatggcttcttccatagttagaagatcgtcgtcaaagttagcaacgtgattcatcaacatttgctgttttgagg
cagcaaatactgaaccgtcgccattcaaccattcataaaaaccatcgtctgaatccattgataatttcttgtactggtttttg
agagctcgcatcaatctagcatttctagctcccggattgaaaacagaaagaggatcgtacatccagggtccattttctgt
aaatagaatcgtataatgtcccttcaagaagatatcagacgatccacaatcaaagaattggtctccgagtttgtaacaa
actgcggactttaacctatacatgataccgtttagcatgatttctggtgatacgtcaatcggagtatcatctattagagatct
aaagccggtgtaacattctccaccaaacatattcttattctgacgtcgttctacataaaacatcattgctccattaacgata
acaggggaatgaacagcactacccatcacattagttcccaatggatcaatgtgtgtaactccagaacatcttccatatc
ctatgttaggaggagcgaacaccactcttccactattgccatcgaatgccatagaataaatatccttggaattgataga
aatcggactgtcggatgttgtgatcatcttcataggattaacaactatgtatggtgccgcctgaagtttcatatcgtaactg
atgccgtttataggtctagccacagaaaccaacgtaggtctaaatccaactatagacaaaatagaagccaatatctgt
tcctcatctgtcataacttgagagcatccagtatgaataatcttcattagatggggatctaccgcatcatcatcgttacaat
aaaaaattcccattctaatgttcataattgcttttctaatcatggtatgcatgtttgctctctgaatctctgtggaaattagatct
gatacacctgtaatcactatcggattatcctccgtaagacgattaaccaacaacatataattataagactttacttttctaa
attcataaagttgctggattaggctataggtgtctccatgtacatacgcgttctcgagcgcaggaagtttaataccgaata
gtgccatcagaataggatgaatatagtaattagtttctggttttctataaataaaagacaaatcttgtgaactagacatatc
ggtaaaatgcatggattggaatcgtgtagtcgacagaagaatatgatgattagatggagagtatattttatctaactcttt
gagttggtcaccgattctaggactagctcgagaatgaataagtactaaaggatgagtacatttcacagaaacactagc
attgttcaatgtgctctttacatgggtaaggagttgaaatagctcgtttctatttgttctgacaatatttagtttattcataatgtta
agcatatcctgaatagtaaagttagatgtgtcatacttgttagtagttagatatttagcaattgcattcccatcatttctcaatc
tcgtactccaatcatgtgtagatgctacttcgtcgatggaaaccatacaatcctttttgataggctgttgagattgattatttc
ctgcacgtttaggtttggtacgttgatttctagcccctgcggatataaagtcatcgtctacaatttgggacaatgaattgcat
acactacaagacaaagatttatcagaagtgtgaatatgatcttcatctaccaaagaaagagtttgattagtataactag
attttagtcctgcgttagatgttaaaaaaacatcgctattgaccacggcttccattatttatattcgtagtttttactcgaaagc
gtgattttaatatccaatcttattacttttggaatcgttcaaaacctttgactagttgtagaatttgatctattgccctacgcgtat
actcccttgcatcatatacgttcgtcaccagatcgtttgtttcggcctgaagttggtgcatatctctttcaacattcgacatga
gatccttaagggccatatcgtctagattttgttgagatgctgctcctggatttggattttgttgtgctgttgtacatactgtacca
ccagtaggtgtaggagtacatacagtggccacaataggaggttgaggaggtgtaaccgttggagtagtacaagaaa
tatttccatccgattgttgtgtacatgtagttgttggtaacgtctgagaaggttgggtagatggcggtgtcgtcgtcttttgatc
tttattaaatttagagataatatcctgaacagcattgctcggcgtcaacgctggaaggagtgaactcgccggcgcatca
gtatcttcagacagccaatcaaaaagattagacatatcagatgatgtattagtttgttgtcgtggttttggtgtaggaacag
tactactaggtagaagaataggagccggtgtagctgttggaaccggctgtggagttatatgaatagttggttgtagcggt
tggataggctgtctgctggcgaccgtcatattatctctagctagttgttctcgcaactgtctttgataatacgactcttgagac
tttagtcctatttcaatcgcttcatcctttttcgtatccggatccttttcttcagaataatagattgacgactttggtgtagaggat
tctgccagcccctgtgagaacttgttaaagaagtccatttaaggctttaaaattgaattgcgattataagattaaatggca
gacacagacgatattatcgactatgaatccgatgatctcaccgaatacgaggatgatgaagaagaggaagaagat
ggagagtcactagaaactagtgatatagatcccaaatcttcttataagattgtagaatcagcatccactcatatagaag
atgcgcattccaatcttaaacatatagggaatcatatatctgctcttaaacgacgctatactagacgtataagtctatttga
aatagcgggtataatagcagaaagctataacttgcttcaacgaggaagattacctctagtttcagaattttctgacgaa
acgatgaagcaaaatatgctacatgtaattatacaagagatagaggagggttcttgtcctatagtcatcgaaaagaac
ggagaattgttgtcggtaaacgattttgacaaagatggtctaaaattccatctagactatattatcaaaatttggaaacttc
aaaaacgatattagaatttatacgaatatcgttctctaaatgtcacaatcaagtctcgcatgttcagcaatttattgtcgtac
tttatatcgtgttcattaacgatatcttgcaaaatagtaatgattctatcttccttcgatagatattcttcagagattattgtcttat
attttttcttgttatccgatatgaatttgataagactttgaacattattgatacccgtctgtttaattttttctacagatattttagtttt
ggcagattctatcgtatctgtcaatagacatccaacatcgacattcgacgtcaattgtctataaatcaacgtataaatttta
gaaataacattagcgaattgttgtgcattgatgtcgttattctgaaacagtatgattttaggtagcattttcttaacaaagag
aacgtatttattgttactcagttgaacagatgatatatccagattactaacgcatctgattccgtataccaaactttcagaa
gaaatggtgtacaattgtttgtattcattcaatgtctctttttcagaaattagtttagagtcgaatactgcaataattttcaaga
gatagttttcatcagataagattttatttagtgtagatatgataaaactattgttttgttggagaacttgatacgccgcgttctct
gtagtcgacgctctcaaatgggaaacaatctccattatttttttggaatcggatactatatcttcggtatcttgacgcagtct
agtatacatagagttaagagagattagagtttgtacattaagcaacatgtctctaaatgtggctacaaacttttcctttttca
cataatctagtttattatataccgatttcacaacggcaccagatttaaggaaccagaatgaaaaactctgataactaca
atatttcatcatagttacgattttatcatcttctatagttggtgtaatagcgcatacctttttctccaagactggaaccaacgtc
ataaaaatgtttaaatcaaaatccatatcaacatctgatgcgctaagaccagtctcgcgttcaagattatctttactaatg
gtgacgaactcatcatatagaactctaagtttgtccattatttatttacagatttagttgtttaatttatttgtgctcttccagagtt
gggatagtatttttctaacgtcggtattatattattaggatctacgttcatatgtatcataatattaatcatccacgttttgataa
atctatctttagcttctgaaataacgtatttaaacaaaggagaaaaatatttagctacggcatcagacgcaataacatttt
ttgtaaatgtaacgtatttagacgacagatcttcgttaaaaagttttccatctatgtagaatccatcggttgttaacaccattc
ccgcgtcagattgaataggagtttgaatagtttgttttggaaatagatccttcaataacttatagttgggtgggaaaaaatc
gattttatcactagactctttcttttttactatcattacctcatgaactatttcttgaatgagtatatgtattttctttcctatatcgga
cgcgttcattggaaaatataccatgtcgttaactataagaatatttttatcctcgtttacaaactgaataatatcagatgtag
ttcgtaaacgaactatatcatcaccagcacaacatctaactatatgatatccactagtttcctttagccgtttattatcttgttc
catattagcagtcattccatcatttaagaaggcgtcaaagataatagggagaaatgacattttggattctgttacgacttt
accaaaattaaggatatacggacttactatctttttctcaacgtcgatttgatgaacacacgatgaaaatgtgcttctatga
gattgatcatgtagaaaacaacaagggatacaatatttccgcatatcatgaaatatattaagaaatcccaccttattata
tttccccaaaggatccatgcatgtaaacattatgccgttatcattaataaagacttctttctcatcggatttgtaaaagttgtt
actgatttttttcattccaggatctagataattaataatgatgggttttctattcttattctttgtattttggcatatcctagaccagt
aaacagtttccactttggtaaaatcagcagacttttgaacgctattaaacatggcattaatggcaataactaaaaatgta
aaatatttttctatgttaggaatatggtttttcactttaatagatatatggtttttggccaaaatgatagatatttttttatccgagg
atagtaaaatattattagtcgccgtctctataaaaatgaagctagtctcgatatccaattttattctagaattgataggagtc
gccaaatgtaccttatacgttatatctcccttgatgcgttccatttgtgtatctatatcggacacaagatctgtaaatagtttta
cgttattaatcatcacggtatcgccgtcgctagataacgctaatgtaccatccaagtcccaaatggagagatttaactgtt
catcgtttagaataaaatgattaccggtcatattaataaagtgttcatcgtatctagataacaacgacttataattaatgtc
caagtcttgaactcgctgaatgatcttttttaacccagttagttttagattggtacgaaatatattgttaaactttgattctaca
gtaatgtccaaatctagttgtggaaatacttccatcaacattgtttcaaacttgataatattattatctacatcttcatacgatc
caaattccggaatagatgtatcacatgctcttgccacccagataaccaaaaagtcacacgctccaggatatacattgt
ataaaaagctatcgttttttagtagtgtttttttctgagtatatacgaagggattaaaaatagtattatcaacgtaactatattc
caaattattcttatgagaatagataataatatcgtccttaatatctaacaaatttcctaaatatccctttaattgagtcattcga
agcgtcaatagaatatgtctcttaactatttccggctgttgtatatttaaatgacttcgtaaaaaataatatatgggcgactt
ctcatctatgtaatcatatggagtgagatatagggctcgttctacctcctgccccttacccacctgtaataccaattgcgg
acttactatatatcgcatatttatatcgtggggtaaagtgaaaatctactaccgatgatgtaagtcttacaatgttcgaacc
agtaccagatcttaatttggaggcctccgtagaactaggggaggtaaatatagatcaaacaacacctatgataaagg
aaaatagcggttttatatcccgtagtagacgtctattcgcccatagatctaaggatgatgagagaaaactagcactacg
attctttttacaaagactttattttttagatcatagagagattcattatttgttcagatgcgttgacgctgtaaaagacgtcact
attaccaaaaaaaataacattatcgtggcgccttatatagcacttttaactatcgcatcaaaaggatgcaaacttacag
aaacaatgattgaagcattttttccagaactatataatgaacatagtaagaaatttaaattcaactctcaagtatccatca
tccaagaaaaactcggataccagtttggaaactatcacgtttatgattttgaaccgtattactctacagtagctctggctat
tcgagatgaacattcatctggcatttttaatatccgtcaagagagttatctggtaagttcattatctgaaataacatatagat
tttatctaattaatctaaaatctgatcttgttcaatggagtgctagtacgggcgctgtaattaatcaaatggtaaatactgtat
tgattacagtgtatgaaaagttacaactggtcatagaaaatgattcacaatttacatgttcattggctgtggaatcaaaac
ttccaataaaattacttaaagatagaaatgaattatttacaaaattcattaacgagttaaaaaagaccagttcattcaag
ataagcaaacgcgataaggatacgctactaaaatattttacttaggactggagttagaatttatagacgactcatttcgtt
tatcattgttactattattactattactatcattattagtgttggcattattagtattcttcttgtcatcttgttcagaaatatacagc
aatgctatacctaatactaaatacattatcatgctcgcaatggctctaacaacaacgaaccaaaatgaatttggtcgta
gcttttgttcacaaaaatacataaagaaatgtctacataaatctatggcgccattggctacttgaaatagcgccagtcct
cctacagattttaatatagctgtataacatgacatttattcatcatcaaaagagacagagtcaccatctgtcatatttagatt
ttttttcatgtgttcaaagtatcctctactcatttcattataatagtttatcatacttagaattttaggacggatcaatgagtaag
acttgactagatcgtcagtagtaatttgtgcatcgtctattctgcatccgcttcgtcgaataatgtatagcatcgctttgagat
tctccatagctatcaagtctttatacaatgacatggaaatatctgtgaatactttatacttctccaacatcgatgccttaacat
catcgcctactttagcattgaaaatacgttctattgtgtagatggatgtagcaagatttttaaacaacaatgccatcttaca
cgatgattgcctcaagtctccaatcttttgtttagaacgattagctacagagttcaacgcttggctgactagcatattattat
ctttagaaattgtattcttcaatgaggcgtttatcatatctgtgatttcgttagtcatattacagtctgactgggttgtaatgttat
ccaacatatcacctatggatacggtacacgtaccagcatttgtaataatcctatctaagatgttgtatggcattgcgcag
aaaatatcttctcctgtaatatctccactctcgataaatctactcagattattcttaaatgccttattctctggagaaaagata
tcagtgtccatcatttcattaatagtatacgcagaaaagataccacgagtatcaattctatccaagatacttatcggttcc
gagtcacagataatggtttcctctccttcgggagatcctgcatagaaatatctaggacaatagtttctatactgtctgtaac
tctgataatctctaaagtcactaactgataccatgaaattgagaagatcaaacgctgaagtaatcaatttttctgcctcgtt
tttactacaactagttttcatcaatgtagcgacgatgtattgtttagttactcttggtctaatactgatgatagagatattattgc
ttcccataatggatcttctagtagtcaccttaaagcccattgatgcgaatagcagatagataaagtcttggtatgactcctt
tctaatatagtacggactacctttgtcacccaactttatacccacataagccataacaacctctttaatagccgtttcatga
ggtttatcagccatgagcctgagtagttggaagaatctcatgaatcccgtctcagaaagtcctatatgcatgatagattta
tctttcctgggaaactctcgtatagtcatagatgaaatactcttcaaagtttctgaaataagattagtaacagtcttacctcc
gactactctgggtaacaaacatactctaataggtgttttctctgcggagataatatcagaaaggatagagcaataagta
gtattattgtgattataaagaccgaatacataacaggtagaatttataaacatcatgtcctgaaggtttttagacttgtattc
ctcgtaatccataccgtcccaaaacatggatttggtaactttgatagccgtagatctttgttccttcgccaacaggttaaag
aaattaataaagaatttgttgtttctatttatgtccacaaattgcacgtttggaagcgccacggttacattcactgcagcattt
tgaggatcgcgagtatgaagtacgatgttattgtttactggtatatctggaaagaaatctaccagtctaggaataagaga
ttgatatcgcatagaaatagtaaagtttataatctcatcatcgaagagcattttgttaccattgtaataaatatccactctgtc
atatgtataaatgaagtactgttcaaacatgatgagatgtttatatgttggcatagtagtgagatcgacgtttggtaatggc
aatgtattaagattaactccataatgtctagcagcatctgcgatgttataagcgtcgtcaaagcggggtcgatcttgtattg
ttatatattgtctaacacctataagattatcaaaatcttgtctgcttaatacaccgttaacaatttttgccttgaattcttttattgg
tgcattaataacatccttatagaggatgttaaacaaataagtgttatcaaagttaagatctggatatttcttttctgctagaa
catccattgagtcggagccatctggtttaatataaccaccgataaatctagctctgtattctgtatccgtcaatctaatatta
agaaggtgttgagtgaaaggtggaagatcgtaaaagctgtgagtattaatgataggattagtttccgaactaatgttaat
tggggtattaataatatctatatttccagcgttaagtgtaacattaaacagttttaattcacgtgacgtggtatcaattaaata
attaatgcccaatttggatatagcagcctgaagctcatcttgtttagttacggatcctaatgagttattaagcaatatatcga
acggatgaacgaaggttgttttaagttggtcacatactttgtaatctagacatagatgcggaagaacggtagaaactat
acgaaataaatattcagagtcctctaattgatcaagagtaactattgacttaataggcatcatttatttagtattaaatgac
gaccgtaccagtgacggatatacaaaacgatttaattacagagttttcagaagataattatccatctaacaaaaattat
gaaataactcttcgtcaaatgtctattctaactcacgttaacaacgtggtagatagagaacataatgccgccgtagtgtc
atctccagaggaaatatcctcacaacttaatgaagatctatttccagatgatgattcaccggccactattatcgaacgag
tacaacctcatactactattattgacgatactccacctcctacttttcgtagagagttattgatatcggaacaacgtcaaca
acgagaaaaaagatttaatattacagtatcgaaaaatgctgaagcaataatggaatctagatctatgataacttctatg
ccaacacaaacaccatccttgggagtagtttatgataaagataaaagaattcagatgttggaggatgaagtggttaat
cttagaaatcaacgatctaatacaaaatcatctgataatttagataattttaccaaaatactatttggtaagactccgtata
aatcaacagaagttaataagcgtatagccatcgttaattatgcaaatttgaacgggtctcccttatcagtcgaggacttg
gatgtttgttcagaggatgaaatagatagaatctataaaacgattaaacaatatcacgaaagtagaaaacaaaaaat
tatcgtcactaacgtgattattattgtcataaacattatcgagcaagcattgctaaaactcggatttgaagaaatcaaag
gactgagtaccgatatcacttcagaaattatcgatgtggagatcggagatgactgcgatgctgtagcatcaaaactag
gaatcggtaacagtccggttcttaatattgtattgtttatactcaagatattcgttaaacgaattaaaattatttaatttaatac
attcccatatccagacaacaatcgtctggattaatctgttcctgtcgtctcataccggacgacatattaatctttttattagta
ggcatctttttagatggtttctttttcccagcattaactgagtcgatacctagaagatcgtgattgatctctccgaccattcca
cgaacttctaattggccgtctctaacggtaccataaactattttaccagcattagtaacagcttggacaatctgaccatcc
atcgcattgtacgatgtagtagtaactgttgttctacgtctaggagcaccagaagtatttttggagcccttggaggctgatg
tagaagaagacgaggattttgattttggtttacatgtaatacattttgaactctttgattttgtatcacatgcgccggcagtca
catctgtttgagaattaagattattgttgcctcctttgacggctgcatctccaccgatttgcgctagtagatttttaagctgtgg
tgtaatcttattaactgtttcgatataatcatcgtaactgcttctaacggctaaattttttttatccgccatttagaagctaaaaa
tatttttatttatacagaagatttaactagattatacaatgaactaatatgatccttttccagattatttacaaacttggtatttttt
ggttctggaggaggcgaatttaaattcggacttggattcggattttgtgagttcttgatcttattatacatcgagtataggatg
gcgacggtaactgctacacaaataccgatcaacaaaagaataccaatcatttattgacaataacttcactattgatca
agtatgcaatatatcatcttttcactaaataagtagtaataatgattcaacaatgtcgagatatatggacgataataattta
gttcatggaaatatcgctatgattggtatgaatgactccgctaactctgtggggcgcgcagtgctttccccacatagaat
aaattagcattccgactgtgataataataccaagtataaacgccataatactcaatactttccatgtacgagtgggactg
gtagacttactaaagtcaataaaggcgaagatacacgaaagaatcaaaagaatgattccagcgattagcacgccg
gaaaaataatttccaatcataagcatcatgtccatttaactaataaaaattttaaatcgccgaatgaacaaagtggaat
ataaaccatataaaaacaatagtttgtactgcaaaaataatatctatttttgttttcgaagatatggtaaaattaaatagta
gtacacagcatgttataactaacagcagcaacggctcgtaattacttatcatttactagacgaaaaggtggtgggatatt
ttcttgctcaaataatacgaatatatcacccatccattttatgcgatgtttatatactctaatctttaatagatctatagacgac
gggtttaccaacaatatagattttatcgattcatctaatttaaacccttccttaaacgtgaatgatctattatctggcataacg
atgaccctacctgatgaatcggacaatgtactgggccatgtagaataaattatcaacgaattatcgtctacgaacattta
tatcatttgttttaattttaggacgcgaataaatagatataaaatagaaaataacagatattacaaccagtgttatggccg
cgcccaaccaggtaggcagttttattttatcttttactacaggttctcctggatgtacgtcaccaacggcggacgtagttct
agtacaattagacgtaagttccgcttgggaattttttaacgctaaagagttaacgttaatcgtgcacccaacgtatttacat
ctagttctttgaacatcttgattataatataaccattttctatctctagattcgtcggtgcactcatgtaaccaacataccctag
gtcctaaatatttatctccggaattagattttggataattcgcgcaccaacaatttctatttcctttatgatcgttacaaaaga
cgtataatgccgtatccccaaaagtaaaataatcaggacgaataattctaataaactcagaacaatatctcgcatcca
tatgtttggagcaaatatcggaataagtagacatagccggtttccgttttgcacgtaaccattctaaacaattggggtttcc
aggatcgtttctacaaaatccagtcatgaaatcgtcacaatgttctgtcttgtaattattattaaatatttttggacagtgtttg
gtatttgtcttagaacaacattttgccacgctatcactatcgcccaggagataatccttttttataaaatgacatcgttgccc
ggatgctatataatcagtagcgtgttttaaatccttaatatattcaggagttacctcgttctgataatagattaatgatccag
gacgaaatttgaaagaactacatggttctccatgaattaatacatattgtttagcaaattcaggaactataaaactacta
caatgatctatcgacataccatctatcaaacaaaacttgggtttaatttctcccggagatgtttcataatagtacgtataac
tttcttctgcaaacttaacagctctattatattcaggataattaaaacctaattccatatatttgtctcgtatatctgctattcctg
gtgctattttgattctattaagagtaacagctgcccccattcttaataatcgtcagtatttaaactgttaaatgttggtatatca
acatctaccttatttcccgcagtataaggtttgttgcaggtatactgttcaggaatggttacatttatacttcttctatagtcctg
tctttcgatgttcatcacatatgcaaagaacagaataaacaaaataatgtaagaaataatattaaatatctgtgaattcgt
aaatacattgattgccataataattacagcagctacaatacacacaatagacattcccacagtgttgccattacctcca
cgatacatttgagttactaagcaataggtaataactaagctagtaagaggcaatagaaaagatgagataaatatcatc
aatatagagattagaggagggctatatagagccaagacgaacaaaatcaaaccgagtaacgttctaacatcattatt
tttgaagattcccaaataatcattcattcctccataatcgttttgcatcatacctccatctttaggcataaacgattgctgctgt
tcctctgtaaataaatctttatcaagcactccagcacccgcagagaagtcgtcaagcatattgtaatatcttaaataactc
atttatatattaaaaaatgtcactattaaagatggagtataatctttatgccgaactaaaaaaaatgacttgtggtcaacc
cctaagtctttttaacgaagacggggatttcgtagaagttgaaccgggatcatcctttaagtttctgatacctaagggatttt
acgcctctccttccgtaaagacgagtctagtatttgaaacattaacaacgaccgataataaaatcactagtatcaatcc
aacaaatgcgccaaagttatatcctcttcaacgcaaagtcgtatctgaagtagtttctaatatgaggaaaatgatcgaat
caaaacgtcctctatacattactcttcacttggcgtgtggatttggtaagactattaccacgtgttatcttatggctacacac
ggtagaaaaaccgtcatttgcgtacccaataaaatgttaatacatcaatggaagacacaggtagaggcagtcggatt
ggaacataagatatccatagatggagtaagtagtctattaaaggaactaaagactcaaagtccggatgtattaatagt
agtcagtagacatctgacaaacgatgccttttgtaaatatatcaataagcattatgatttgttcatcttggatgaatcacat
acgtataatctgatgaacaatacagcagttacaagatttttagcgtattatcctccgatgatgtgttattttttaactgctaca
cctagaccagctaaccgaatttattgtaacagtattattaatattgccaagttatccgatctaaaaaaaactatctatgcg
gtagatagtttttttgagccatattccacagacaatattagacatatggtaaaacgactagatggaccatctaataaatat
catatatataccgagaagttattatctgtagacgagcctagaaatcaacttattcttaataccctggtagaagaattcaag
tcaggaactattaatcgcattttagttattactaaactacgtgaacatatggtattattctacaaacgattattagatcttttcg
gaccagaggttgtatttataggagacgcccaaaatagacgtactccagatatggtcaaatcaatcaaggaactaaat
agatttatattcgtatccaccttattttattccggtactggtttagatattcctagtttggattcgttgttcatttgctcggcagtaat
caacaatatgcaaatagagcaattactagggagggtatgtcgagaaacagaactattagataggacggtatatgtatt
tcctaacacatccatcaaagaaataaagtacatgataggaaatttcatgcaacgaattattagtctgtctgtagataaac
taggatttaaacaagaaagttatcggaaacatcaagaatccgatcccacttctgtatgtacaacatcctccagagaag
aacgtgtattaaatagaatatttaactcgcaaaatcgttaagaagtttaagcgacgatccgcatgctgcgcaggccagt
gtattacccctcatagtattaatataatccaatgatacttttgtgatgtcggaaatcttaaccaatttagactgacaggcag
aacacgtcatgcaatcatcatcgtcatcgataactgtagtcttgggcttctttttgcggctcttcattccggaacgcacattg
gtgctatccatttaggtagtaaaaaataagtcagaatatgccctataacacgatcgtgcaaaacctggtatatcgtctct
atctttatcacaatatagtgtatcgacatctttattattattgacctcgtttatcttggaacatggaatgggaacatttttgttatc
aacggccacctttgccttaattccagatgttgtaaaattataactaaacagtctatcatcgacacaaatgaaattcttgttt
agacgtttgtagtttacgtatgcggctcgttcgcgtctcattttttcagatattgcaggtactataatattaaaaataagaatg
aaataacataggattaaaaataaagttatcatgacttctagcgctgatttaactaacttaaaagaattacttagtctgtac
aaaagtttgaaattttcagattctgcggctatagaaaagtataattctttggtagaatggggaacatctacttactggaaa
ataggcgtgcaaaaggtagctaatgtcgagacgtcaatatctgattattatgatgaggtaaaaaataaaccgtttaatat
tgatccgggctattacattttcttaccggtatattttgggagcgtctttatttattcgaagggtaaaaatatggtagaacttgg
atctggaaactcttttcaaataccagatgatatgcgaagtgcgtgtaacaaagtattagacagcgataacggaataga
ctttctgagatttgttttgttaaacaatagatggataatggaagatgctatatcaaaatatcagtctccagttaatatatttaa
actagctagtgagtacggattaaacatacccaaatatttagaaattgaaatagaggaagacacattatttgacgacga
gttatactctattatagaacgctcttttgatgataaatttccaaaaatatccatatcgtatattaagttgggagaacttaggc
ggcaagttgtagactttttcaaattctcgttcatgtatattgagtccatcaaggtagatcgtataggagataatatttttattcc
tagcgttataacaaaatcaggaaaaaagatattagtaaaagatgtagaccatttaatacgatctaaggttagagaac
atacatttgtaaaagtaaaaaagaaaaacacattttccattttatacgactatgatgggaacggaacagaaactagag
gagaagtaataaaacgaattatagacactataggacgagactattatgttaacggaaagtatttctctaaggttggtag
tgcaggcttaaagcaattgactaataaattagatattaatgagtgcgcaactgtcgatgagttagttgatgagattaata
aatccggaactgtaaaacgaaaaataaaaaaccaatcagcatttgatttaagcagagaatgtttgggatatccagaa
gcagattttataacgttagttaataacatgcggttcaaaatagaaaattgtaaggttgtaaatttcaatattgaaaatacta
attgtttaaataacccgagtattgaaactatatatggaaactttaaccagttcgtctcaatctttaatatcgtcaccgatgtc
aaaaaaagattattcgagtgaaataatatgcgcctttgatataggtgcaaaaaatcctgccagaactgttttagaagtc
aaggataactccgttagggtattggatatatcaaaattagactggagttctgattgggaaaggcgcatagctaaagattt
gtcacaatatgaatacactacagttcttctagaacgtcagcctagaaggtcgccgtatgttaaatttatctattttattaaag
gctttttatatcatacatcggctgccaaagttatttgcgtctcgcctgtcatgtctggtaattcatatagagatcgaaaaaag
agatcggtcgaagcatttcttgattggatggacacattcggattgcgagactccgttccggatagacgcaaattagacg
atgtagcggatagtttcaatttggctatgagatacgtattagataaatggaatactaattatacaccttataataggtgtaa
atctagaaattacataaaaaaaatgtaataacgttagtaacgccattatggataatctatttacctttctacatgaaatag
aagatagatatgccagaactatttttaactttcatctaataagttgcgatgaaataggagatatatatggtcttatgaaag
aacgcatttcctcagaggatatgtttgataatatagtatataataaagatatacatcctgccattaagaaactagtgtattg
cgacatccaacttactaaacacattattaatcagaatacgtatccggtatttaacgattcttcacaagtgaaatgttgtcat
tatttcgacataaactcagataatagcaatattagctctcgtacagtagagatatttgagagggaaaagtcatctcttgta
tcatatattaaaactaccaataagaagagaaaggtcaattacggcgaaataaagaaaactgttcatggaggcacta
atgcaaattacttttccggtaaaaagtctgacgagtatctgagtactacagttagatccaacattaatcaaccttggatca
aaaccatttctaagagaatgagagtagatatcattaatcactctatagtaacgcgtggaaaaagctctatattacaaac
tatagaaattatttttactaatagaacatgtgtgaaaatattcaaggattctactatgcacattattctatccaaggacaag
gatgaaaaggggtgtatacacatgattgacaaattattctatgtctattataatttatttctgttgttcgaagatatcatccaa
aacgagtactttaaagaagtagctaatgttgtaaaccacgtacttacggctacggcattagatgagaaattattcctaat
taagaaaatggctgaacacgatgtttatggagttagcaatttcaaaatagggatgtttaacctgacatttattaagtcgttg
gatcataccgttttcccctctctgttagatgaggatagcaaaataaagttttttaaggggaaaaagctcaatattgtagca
ttacgatctctggaggattgtataaattacgtgactaaatccgagaatatgatagaaatgatgaaggaaagatcgacta
ttttaaatagcatagatatagaaacggaatcggtagatcgtctaaaagaattgcttctaaaatgaaaaaaaacactgat
tcagaaatggatcaacgactagggtataagtttttggtgcctgatcctaaagccggagttttttatagaccgttacatttcc
aatatgtatcgtattctaattttatattgcatcgattgcatgaaatcttgaccgtcaagcggccactcttatcgtttaagaata
atacagaacgaattatgatagaaattagcaatgttaaagtgactcctccagattactcacctataatcgcgagtattaaa
ggtaagagttatgatgcattagccacgttcactgtaaatatctttttttctagacactaaataaaatatttaaaatataatatt
aatgtactaaaacttatatattattaatttatctaactaaagttagtaaattatatatataattttataattaatttaattttactaat
tttatttagtgtctagaaaaaaa

[0077] An example sequence of sVAC fragment 3 (F3, 66679 bp in length) (SEQ ID NO: 18):

tttttttctagacactaaataaaatatttaaaatataatattaatgtactaaaacttatatattattaatttatctaactaaagtta
gtaaattatatatataattttataattaatttaattttactaattttatttagtgtctagaaaaaaaattttgggagcgtctttatttat
tcgaagggtaaaaatatggtagaacttggatctggaaactcttttcaaataccagatgatatgcgaagtgcgtgtaaca
aagtattagacagcgataacggaatagactttctgagatttgttttgttaaacaatagatggataatggaagatgctatat
caaaatatcagtctccagttaatatatttaaactagctagtgagtacggattaaacatacccaaatatttagaaattgaa
atagaggaagacacattatttgacgacgagttatactctattatagaacgctcttttgatgataaatttccaaaaatatcc
atatcgtatattaagttgggagaacttaggcggcaagttgtagactttttcaaattctcgttcatgtatattgagtccatcaa
ggtagatcgtataggagataatatttttattcctagcgttataacaaaatcaggaaaaaagatattagtaaaagatgtag
accatttaatacgatctaaggttagagaacatacatttgtaaaagtaaaaaagaaaaacacattttccattttatacgac
tatgatgggaacggaacagaaactagaggagaagtaataaaacgaattatagacactataggacgagactattat
gttaacggaaagtatttctctaaggttggtagtgcaggcttaaagcaattgactaataaattagatattaatgagtgcgca
actgtcgatgagttagttgatgagattaataaatccggaactgtaaaacgaaaaataaaaaaccaatcagcatttgatt
taagcagagaatgtttgggatatccagaagcagattttataacgttagttaataacatgcggttcaaaatagaaaattgt
aaggttgtaaatttcaatattgaaaatactaattgtttaaataacccgagtattgaaactatatatggaaactttaaccagtt
cgtctcaatctttaatatcgtcaccgatgtcaaaaaaagattattcgagtgaaataatatgcgcctttgatataggtgcaa
aaaatcctgccagaactgttttagaagtcaaggataactccgttagggtattggatatatcaaaattagactggagttct
gattgggaaaggcgcatagctaaagatttgtcacaatatgaatacactacagttcttctagaacgtcagcctagaaggt
cgccgtatgttaaatttatctattttattaaaggctttttatatcatacatcggctgccaaagttatttgcgtctcgcctgtcatgt
ctggtaattcatatagagatcgaaaaaagagatcggtcgaagcatttcttgattggatggacacattcggattgcgaga
ctccgttccggatagacgcaaattagacgatgtagcggatagtttcaatttggctatgagatacgtattagataaatgga
atactaattatacaccttataataggtgtaaatctagaaattacataaaaaaaatgtaataacgttagtaacgccattatg
gataatctatttacctttctacatgaaatagaagatagatatgccagaactatttttaactttcatctaataagttgcgatga
aataggagatatatatggtcttatgaaagaacgcatttcctcagaggatatgtttgataatatagtatataataaagatat
acatcctgccattaagaaactagtgtattgcgacatccaacttactaaacacattattaatcagaatacgtatccggtatt
taacgattcttcacaagtgaaatgttgtcattatttcgacataaactcagataatagcaatattagctctcgtacagtagag
atatttgagagggaaaagtcatctcttgtatcatatattaaaactaccaataagaagagaaaggtcaattacggcgaa
ataaagaaaactgttcatggaggcactaatgcaaattacttttccggtaaaaagtctgacgagtatctgagtactacag
ttagatccaacattaatcaaccttggatcaaaaccatttctaagagaatgagagtagatatcattaatcactctatagtaa
cgcgtggaaaaagctctatattacaaactatagaaattatttttactaatagaacatgtgtgaaaatattcaaggattcta
ctatgcacattattctatccaaggacaaggatgaaaaggggtgtatacacatgattgacaaattattctatgtctattata
atttatttctgttgttcgaagatatcatccaaaacgagtactttaaagaagtagctaatgttgtaaaccacgtacttacggct
acggcattagatgagaaattattcctaattaagaaaatggctgaacacgatgtttatggagttagcaatttcaaaatagg
gatgtttaacctgacatttattaagtcgttggatcataccgttttcccctctctgttagatgaggatagcaaaataaagtttttt
aaggggaaaaagctcaatattgtagcattacgatctctggaggattgtataaattacgtgactaaatccgagaatatga
tagaaatgatgaaggaaagatcgactattttaaatagcatagatatagaaacggaatcggtagatcgtctaaaagaa
ttgcttctaaaatgaaaaaaaacactgattcagaaatggatcaacgactagggtataagtttttggtgcctgatcctaaa
gccggagttttttatagaccgttacatttccaatatgtatcgtattctaattttatattgcatcgattgcatgaaatcttgaccgt
caagcggccactcttatcgtttaagaataatacagaacgaattatgatagaaattagcaatgttaaagtgactcctcca
gattactcacctataatcgcgagtattaaaggtaagagttatgatgcattagccacgttcactgtaaatatctttaaagag
gtaatgaccaaagagggtatatccatcactaaaataagtagttatgagggaaaagattctcatttgataaaaattccgc
tactaataggatacgggaataaaaatccacttgatacagccaagtatcttgttcctaatgtcataggtggagtctttatca
ataaacaatctgtcgaaaaagtaggaattaatctagtagaaaagattacaacatggccaaaatttagggttgttaagc
caaactcattcactttctcgttttcctccgtatcccctcctaatgtattaccgacaagatatcgccattacaagatatctctgg
atatatcacaattggaagcgttgaatatatcatcgacaaagacatttataacggtcaatattgttttgctgtctcaatatttat
ctagagtgagtctagaattcattagacgtagtttatcatacgatatgcctccagaagttgtctatctagtaaacgcgataat
agatagtgctaaacgaattactgaatctattactgactttaatattgatacatacattaatgacctggtggaagctgaaca
cattaaacaaaaatctcagttaacgatcaacgagttcaaatatgaaatgctgcataactttttacctcatatgaactatac
acccgatcaactaaagggattttatatgatatctttactaagaaagtttctctactgtatctaccacacttctagatatccag
atagagattcgatggtttgtcatcgcatcctaacgtacggcaaatattttgagacgttggcacatgatgaattagagaatt
acataggcaacatccgaaacgatatcatgaacaatcacaagaacagaggcacttacgcggtaaacattcatgtact
aacaactcccggacttaatcacgcgttttctagcttattgagtggaaagttcaaaaagtcagacggtagttatcgaaca
catcctcactattcatggatgcagaatatttctattcctaggagtgttggattttatccggatcaagtaaagatttcaaagat
gttttctgtcagaaaataccatccaagtcaatatctttacttttgttcatcggacgttccggaaagaggtcctcaggtaggtt
tagtatctcaattgtctgtcttgagttccattacaaatatactaacgtctgagtatttggatttggaaaagaaaatttgtgagt
atatcagatcatattataaagatgatataagttactttgaaacaggatttccaatcactatagaaaatgctctagtcgcat
ctcttaatccaaatatgatatgtgattttgtaactgactttagacgtagaaaacggatgggattcttcggtaacttggaggt
aggtattactttagttagggatcacatgaatgaaattcgcattaatattggagcgggaagattagtcagaccattcttggtt
gtggataacggagagctcatgatggatgtgtgtccggagttagaaagcagattagacgacatgacattctctgacatt
cagaaagagtttccgcatgtcatcgaaatggtagatatagaacaatttacttttagtaacgtatgtgaatcggttcaaaa
atttagaatgatgtcaaaggatgaaagaaagcaatacgatttatgtgactttcctgccgaatttagagatggatatgtgg
catcttcattagtgggaatcaatcacaattctggacccagagctattcttggatgtgctcaagctaaacaagctatctcttg
tctgagttcggatatacgaaataaaatagacaatggaattcatttgatgtatccagagaggccaatcgtgattagtaag
gctttagaaacttcaaagattgcggctaattgcttcggccaacatgttactatagcattaatgtcgtacaaaggtatcaat
caagaggatggaattatcatcaaaaaacaatttattcagagaggcggtctcgatatagttaccgcaaagaaacatca
agtagaaattccgttggaaaactttaataacaaagaaagagataggtctaacgcctattcaaaattagaaagtaatgg
attagttagactgaatgctttcttggaatccggagacgctatggcacgaaatatctcatcaagaactcttgaagatgatttt
gctagagataatcagattagcttcgatgtttccgagaaatataccgatatgtacaaatctcgcgttgaacgagtacaagt
agaacttactgacaaagttaaggtacgagtattaaccatgaaagaaagaagacccattctaggagataaatttacca
ctagaacgagtcaaaagggaacagtcgcgtatgtcgcggatgaaacggaacttccatacgacgaaaatggtatca
caccagatgtcattattaattctacatccatcttctctagaaaaactatatctatgttgatagaggttattttaacagccgcat
attctgctaagccgtacaacaataagggagaaaaccgacctgtctgttttcctagtagtaacgaaacatccatcgatac
atatatgcaattcgctaaacaatgttatgagcattcaaatccgaaattgtccgatgaagaattatcggataaaatcttttgt
gaaaagattctctatgatcctgaaacggataagccttatgcatccaaagtattttttggaccaatttattacttgcgtctgag
gcatttaactcaggacaaggcaaccgttagatgtagaggtaaaaagacgaagctcattagacaggcgaatgaggg
acgaaaacgtggaggaggtatcaagttcggagaaatggagagagactgtttaatagcgcatggcgcagccaatac
tattacagaagttttaaaagactcagaagaggattatcaagatgtgtatgtttgtgaaaattgtggagacatagcagca
caaatcaagggtattaatacatgtcttagatgttcaaaacttaatctctctcctctcttaacaaaaattgataccacgcacg
tatctaaagtatttcttactcaaatgaacgccagaggcgtaaaagtcaaattagatttcgaacgaaggcctccttcgtttt
ataaaccattagataaagttgatctcaagccgtcttttctggtgtaatattctagtttggtagtagatacatatcaatatcatc
aaattcgagatccgaattataaaatgggcgtggattgttaactatagaatcggacgtctgatattcgaaaatctgtggag
ttttaggttttggtggaggtgtaactgctacttgggatactgaagtctgatattcagaaagctgggggatgttctggttcgac
atccaccgatggtgtcacatcactaatcggttcggtaacgtctgtggatggaggtgctacttctacagaacctgtagcct
cagttgtcaacggagatacatttttaatgcgaggaaatgtataatttggtaatggtttctcatgtggatctgaagaagagg
taagatatctactagaaagataccgatcacgttctagttctcttttgtagaacttaactttttctttctcagcatctagttgatatt
ccaacctcttcacgttactacgttcagattccaattcacgttcgcatgggttacctccgcagtttttacgagcgatttcacgtt
cagccttcatgcgtctctccttctctctatcgagtttatcagagcagtctttctgaaggcgatcgaactccataaatttctcca
acgctttgattgtttccatagatttccgaagttcagcttttaggactgtgattctttttctttcgaattcacagctggatgtgcaa
ccgtttccattaccgccatctctaagtttcttttctagatcggcaacatttcatccccatgccttttacattcctcgagtctactg
tcgtcgaaatatcgttccagctccttttcgacatcaataactttagcacgttgtctctcaagctctcttttgtagttatctgattc
cctggcacgtttaagatcttcatgcaattgagtcagctcttaacacaatctcttgcttcttcgtcatagtacttacaatcacta
tgggatccattgttaccacgtctacactcggcgagctcgcgtttaagagattcaatttcccgtttgtattggtccatgtttcca
ttgctaccaccattagatttacaggctgctagttgtcgttcgagatcagaaatacgggttttcttggaattgatttcgtcgatg
tacttggcatcgaaacacttattaagttctttttccaattctacgattttatttctttcgcgagtcaattccctcctgtagtaactat
ctgttttgtcagattcacgctctctacgtagactttcttgcaagttactaatttgttccctagcacgtccgagtttagttttatatg
ctgaatagagttctgattcatcctttgagcagatctctagcgatcgtttaagattcctgattctagtctttagcctatttacctcc
tcagaagatgttccgttaccgttgcgtttacactcgttaagctgtctatcaagatccatgattctatctctaagacgttgcatc
tctctttccatatcagcattgctttcattattacgtctgcagtcactcaactgtctttcaatatctgagattctatctctaagacgt
cgcatctctctctgtttcggcattggtttcattattacgtctacagtcgttcaactgtctttcaagatctgatattctagattggag
tctgctaatctctgtagcattttcacggcattcactcagttgtctttcaagatctgagattttagattggagtctgctaatctctg
taagatttcctcctccgctctcgatgcagtcggtcaacttattctctagttctctaatacgcgaacgcagtgcatcaacttctt
gcgtgtcttcctggttgcgtgtacattcatcgagtctagattcgagatctctaacgcgtcgtcgttcttcctcaagttctctgc
gtactacagaaagcgtgtccctatcttgttgatatttagcaatttctgattctagagtactgattttgcttacgtagttactaata
gttgtcttggccttatcaagatcctccttgtatttgtcgcattccttgatatccctacgaagtctggacagttcccattcgacat
tacgacgtttatcgatttcagctcggagatcgtcatcgcgttgttttagccacatacgactgagttcaagttctcgttgacaa
gatccatctacttttccattcctaatagtatccagttccttttctagttctgaacgcatttctcgttccctatcaagcgattctctc
aattctcggatagtcttcttatcaatttctaataaatctgaaccatcatctgtcccattttgaatatccctgtgttctttgatctcttt
tgtaagtcggtcgattctttcggttttataaacagaatccctttccaaagtcctaatcttactgagtttatcactaagttctgca
ttcaattcggtgagttttctcttggcttcttccaactctgttttaaactctccactatttccgcattcttcctcgcatttatctaacca
ttcaattagtttattaataactagttggtaatcagcgattcctatagccgttcttgtaattgtgggaacataattaggatcttct
aatggattgtatggcttgatagcatcatctttatcattattagggggatggacaaccttaattggttggtcctcatctcctcca
gtagcgtgtggttcttcaataccagtgttagtaataggcttaggcaaatgcttgtcgtacgcgggcacttcctcatccatca
agtatttataatcgggttctacgtctgaatattcttttctaagagacgcgacttcgggagttagtagaagaactctgtttctgt
atctatcaacgctggaatcaatactcaagttaaggatagcgaatacctcatcgtcatcatccgtatcttctgaaacacca
tcatatgacatttcatgaagtctaacgtattgataaatagaatcagatttagtattaaacagatccttaacctttttagtaaa
cgcatatgtatattttagatctccagatttcataatatgatcacatgccttaaatgtcagtgcttccatgatataatctggaac
actaatgggtgacgaaaaagatacagcaccatatgctacgttgataaataaatctgaaccactaagtagataatgatt
aatgttaaggaagaggaaatattcagtatatagatatgccttagcatcatatcttgtactaaacacgctaaacagtttatt
gatgtgatcaatttccaacagaataattagagcagcgggaataccaacaaacatattaccacatccgtattttctatga
atatcacatatcatgttaaaaaatcttgatagaagagcgaatatctcgtctgacttaatgagtcgtagttcagcagcaac
ataagtcataactgtaaatagaacatactttcctgtagtgttgattctagactccacatcaacaccattattaaaaatagttt
tatatacatctttaatctgctctccgttaatcgtcgaacgttctagtatacggaaacactttgatttcttatctgtagttaatgac
ttagtgatatcacgaagaatattacgaattacatttcttgtttttcttgagagacctgattcagaactcaactcatcgttccat
agtttttttacctcagtggcgaaatctttggagtgcttggtacatttttcaataaggttcgtgacctccatttattataaaaaatt
ttattcaaaacttaactacaatcgggtaattataaaatcgtagatctcccatgtggtggaatactaccatctatcgcatgtg
gatggacagtaggtaatggccatgggaacagtaatgtttgcatatttatctttcttgccagtattactgcatattgtcccaat
gtttcgatgtgatgttctaacctatcaactgccgctgtatcacaacaatagtgtccgatgaaattaagattatgatccaatg
tgtttaatatatgattatcaagtcttatacgatccgcgtcttttttgacaggatcaggttcttctacaggaagaagtttcggcct
cttatgatattcatgtctgggaaacggtggtctagggtgaggctccggtatcggagtgggttttggattataatcatcatcg
tctatgacatcatcttcgacttcgatatttattttgctatcttgatgatgtcctgtatcagttgcattttcagcactcgactgaata
ttagcgcattcattgtctattattaccatatttctaaacccaaaatgtatgtgttgaacatcagtactatcgttgatgagtcttat
agcatgaattcgcttatcgttatcgggtttatcttctgtcaccttagcaattccttttttattaaactctacataatcatatccattt
ctattgtttgttctaatataaacgagtatagcatcattgctaaatttttcaatagtatcgaaaacagaatatcctaaaccata
taatatatattcagggacactcaaactaaatgtccaggattctcctaaatacgtaaactttaatagtgcgaaatcattcaa
aaatctaccacttatagatagatagtacataaatgcgtatagtagtctacctatctctttattatgaaaaccggcattacga
tcatatatgtcgtgatatacctgtgatccgtttacgttaaaccataaatacatgggtgatcctataaacatgaatttatttcta
attctcagagctatagttaattgaccgtgtaatatttgcttacatgcatacttgatacgctcattaataaaatttttatcattgct
cgttatctcagaatcgtatatataaggagtaccatcgtgattcttaccagatattatacaaaatactatatataaaatatatt
gaccaacgttagtaatcatataaatgtttaacgttttaaattttgtattcaatgatccattatcatacgctagcatggtcttatg
atattcattctttaaaatataatattgtgttagccattgcattggggctcctaatggagattttttattctcatccattttaggata
ggctttcataaagtccctaataacttcgtgaataatgtttctatgttttctactgatgcatgtatttgcttcgatttttttatcccatg
tttcatctatcatagatttaaacgcagtaatgctcgcaacattaacatcttgaaccgttggtacaattccgttccataaattt
ataatgttcgccatttatataactcattttttgaatatacttttaattaacaaaagagttaagttactcatatgggcgccgtcca
gtctgaacatcaatctttttagccagagatatcatagccgctcttagagtttcagcgtgattttccaacctaaatagaacttc
atcgttgcgtttacaacacttttctatttgttcaaactttgttgttacattagtaatctttttttccaaattagttagccgttgtttgag
agtttcctcattgtcgtcttcatcggctttaacaattgcttcgcgtttagcctctggctttttagcagcctttgtagaaaaaaatt
cagttgctggaattgcaagatcgtcatctccggggaaaagagttccgtccatttaaagtacagattttagaaactgaca
ctctgcgttatttatatttggtacaacacatggattataaatatcgatgttaataacatcagaaaatgtaaagtctatacatt
gttgcatcgtgttaaattttctaatggatctagtattattgggtccaacttctgcctgaaatccaaatatggaagcggataca
aaaccgtttcctggataaaccacacatctccacttttgctttacatcagaaattgtgtcgttgacatcttgaactctcctatct
aatgccggtgttccacctatagattttgaatattcgaatgctgcatgagtagcattaaattccttaatattgccataattttcat
atattgagtaaccctggataaaaagtaaacacaccgcagccgtcgctaccacaataaaaaaaattgatagagagtt
catttataatctattagaagctgacaaaatttttttacacgcatcagacaatgctttaataaatagttcaacatctacttttgtc
atatcgaaccgatggtatgattctaacctagaattacatccgaaaaagttgactatgttcatagtcattaagtcattaaca
aacaacattccagactctggattataagacgatactgtttcgtcacaattacctaccttaatcatgtgattatgaatattgg
ctattagagcaccttctaagaaatctataatatctttgaaacacgatttaaaatcaaaccacgaatatacttctacgaag
aaagttagtttacccataggagaaataactataaatggagatctaaatacaaaatccggatctatgatagttttaacatt
attatattctctattaaatacctccacatctaaaaatgttaattttgaaactatgtcttcgtttattaccgtacctgaactaaac
gctataagctctattgtttgagaactctttaaacgatattcttgaaatacatgtaacaaagtttcctttaactcggtcggtttat
ctaccatagttacagaatttgtatccttatctataatataataatcaaaatcgtataaagttatataattatcgcgttcagatt
gggatcttttcaaatagactaaaaaccccatttctctagtaagtatcttatgtatatgtttgtaaaatatcttcatggtgggaa
tatgctctaccgcagttagccattcctcattgacagcggtagatgtattagacaaaactattccaatgtttaacaagggcc
attttacgagattattaaatccttgtttgataaatgtagccaatgagggttcgagttcaacgacgattgaattctcttcccgc
ggatgctgcatgatgaacgacgggatgttgttcgattgatttggaattctttttcgactttttgtttatattaaatattttaaaattt
atagcggatagcaattcatgtaccacggataatgtagacgcgtattgcgcatcgatatctttattattagataaatttatca
ataaatgtgagaagtttgcctcgttaaggtcttccatttaaatattatataaacatttgtgtttgtatcttattcgtcttttatggaa
tagttttttactagtaaagctgcaattacacactttgtccgtaaaacataaatataaacaccagcttttatcaatcgttccaa
aaagtcgacggcggacatttttaacatggcatctattttaaatacacttaggtttttggaaaaaacatcattttataattgta
acgattcaataactaaagaaaagattaagattaaacataagggaatgtcatttgtattttataagccaaagcattctacc
gttgttaaatacttgtctggaggaggtatatatcatgatgatttggttgtattggggaaggtaacaattaataatctaaagat
gatgctattttacatggatttatcatatcatggagtgacaagtagtggagcaatttacaaattgggatcgtctatcgataga
ctttctctaaataggactattgttacaaaagttaataattatgatgatacattttttgacgacgatgattgatcgctattgcac
aattttgtttttttactttctaatatagcgtttagattctttttcatgtgcgaatattgatttactaaaatatcgatgtttaacttttgttct
atgacgtccttatcagcggtatcggtacatatacgtaattcaccttcacaaaatacggagtcttcgataataatagccaa
tcgattattggatctagctgtctgtatcatattcaacatgtttaatatatcctttcgtttcccctttacaggcatcgatcgtagcat
attttccgcgtctgagatggaaatgttaaaactacaaaaatgcgtaatgttagcccgtcctaatattggtacgtgtctataa
gtttggcatagtagaataatagacgtgtttaaatgccttccaaagtttaagaattctattagagtattgcattttgatagtttat
cacctacatcatcaaaaataagtaaaaagtgtgctgattttttatgattttgtgcgacagcaatacatttttctatgttactttt
agttcgtatcagattatattctagagattcctgactactaacgaaattaatatgatttggccaaatgtatccatcataatctg
ggttataaacgggtgtaaacaagaatatatgtttatattttttaactagtgtagaaaacagagatagtaaatagatagttttt
ccagatccagatcctcccgttaaaaccattctaaacggcatttttaataaattttctcttgaaaattgtttttcttggaaacaa
ttcataattatatttacagttactaaattaatttgataataaatcaaaatatggaaaactaaggtcgttagtagggaggag
aacaaagaaggcacatcgtgacataaataacatttattatcatgatgacaccagaaaacgacgaagagcagacat
ctgtgttctccgctactgtttacggagacaaaattcaaggaaagaataaacgcaaacgcgtgattggtctatgtattaga
atatctatggttatttcactactatctatgattaccatgtccgcgtttctcatagtgcgcctaaatcaatgcatgtctgctaacg
aggctgctattactgacgccgctgttgccgttgctgctgcatcatctactcatagaaaggttgcgtctagcactacacaat
atgatcacaaagaaagctgtaatggtttatattaccagggttcttgttatatattacattcagactaccagttattctcggat
gctaaagcaaattgcactgcggaatcatcaacactacccaataaatccgatgtcttgattacctggctcattgattatgtt
gaggatacatggggatctgatggtaatccaattacaaaaactacatccgattatcaagattctgatgtatcacaagaa
gttagaaagtatttttgtgttaaaacaatgaactaatatttatttttgtacattaataaatgaaatcgcttaatagacaaactg
taagtaggtttaagaagttgtcggtgccggccgctataatgatgatactctcaaccattattagtggcataggaacatttct
gcattacaaagaagaactgatgcctagtgcttgcgccaatggatggatacaatacgataaacattgttatttagatact
aacattaaaatgtctacagataatgcggtttatcagtgtcgtaaattacgagccagattgcctagaccggatactagac
atctgagagtattgtttagtattttttataaagattattgggtaagtttaaaaaagaccaatgataaatggttagatattaata
atgataaagatatagatattagtaaattaacaaattttaaacaactaaacagtacgacggatgctgaagcgtgttatat
atacaagtctggaaaactggttaaaacagtatgtaaaagtactcaatctgtactatgtgttaaaaaattctacaagtgac
aacaaaaaatgaattaataataagtcgttaacgtacgccgccatggacgccgcgtttgttattactccaatgggtgtgtt
gactataacagatacattgtatgatgatctcgatatctcaatcatggactttataggaccatacattataggtaacataaa
aactgtccaaatagatgtacgggatataaaatattccgacatgcaaaaatgctactttagctataagggtaaaatagtt
cctcaggattctaatgatttggctagattcaacatttatagcatttgtgccgcatacagatcaaaaaataccatcatcata
gcatgcgactatgatatcatgttagatatagaagataaacatcagccattttatctattcccatctattgatgtttttaacgct
acaatcatagaagcgtataacctgtatacagctggagattatcatctaatcatcaatccttcagataatctgaaaatgaa
attgttgtttaattcttcattctgcatatcagacggcaatggatggatcataattgatgggaaatgcaatagtaattttttatca
taaaagttgtaaagtaaataataaaacaataaatattgaactagtagtacgtatattgagcaatcagaaatgatgctgg
tacctcttatcacggtgaccgtagttgcgggaacaatattagtatgttatatattatatatttgtaggaaaaagatacgtact
gtctataatgacaataaaattatcatgacaaaattaaaaaagataaagagttctaattccagcaaatctagtaaatcaa
ctgatagcgaatcagactgggaggatcactgtagtgctatggaacaaaacaatgacgtagataatatttctaggaatg
agatattggacgatgatagcttcgctggtagtttaatatgggataacgaatccaatgtcatggcgcctagcacagaaca
catttacgatagtgttgctggaagcacgctgctaataaataatgatcgtaatgaacagactatttatcagaacactacag
tagtaattaatgagacggagactgttgaagtacttaatgaagataccaaacagaatcctaactattcatccaatcctttc
gtaaattataataaaaccagtatttgtagcaagtcaaatccgttcattacagaactcaacaataaatttagtgagaataa
tccgtttagacgagcacatagcgatgattatcttaataagcaagaacaagatcatgaacacgatgatatagaatcatc
ggtcgtatcattggtgtgattagtttcctttttataaaattgaagtaatatttagtattattgctgccgtcacgttgtacaaatgg
agatattccctgtattcggcatttctaaaattagcaattttattgctaataatgactgtagatattatatagatacagaacatc
aaaaaattatatctgatgagatcaatagacagatggatgaaacggtacttcttaccaacatcttaagcgtagaagttgt
aaatgacaatgagatgtaccatcttattccccatagactatcgactattatactctgtattagttctgtcggaggatgtgttat
ctctatagataatgacatcaatgacaaaaatattctaacatttcccattgatcatgctgtaatcatatccccactgagtaa
atgtgtcgtagttagcaagggtcctacaaccatattggttgttaaagcggatatacccagcaaacgattggtaacatcgt
ttacaaacgacatactgtatgtaaacaatctgtcactgattaattatttgccgttgtctgtattcattattagacgagtcaccg
actatttggatagacacatatgcgatcagatatttgcgaataataagtggtattccattataaccatcgacgataagcaa
tatcctattccatcaaactgtataggtatgtcctctgccaagtacataaattctagcatcgagcaagatactttaatacatg
tttgtaacctcgagcatccattcgacttagtatacaaaaaaatgcagtcgtacaattctgtacctatcaaggaacaaata
ttgtacggtagaattgataatataaatatgagcattagtatttctgtggattaatagatttctagtatggggatcattaatcat
ctctaatctctaaatacctcataaaacgaaaaaaaagctattatcaaatactgtacggaatggattcattctcttctcttttt
atgaaactctgttgtatatctactgataaaactggaagcaaaaaatctgataaaaagaataagaataagatcaagga
ttatatggaacacgattattataaaataacaatagttcctggttcctcttccacgtctactagctcgtggtattatacacatg
cctagtaatagtctctttgcgttgacggaaagcagactagaaataacaggctaaaatgttcagacaccataatagttcc
caacccagataataacagagtaccatcaacacattcctttaaactcaatcccaaacccaaaaccgttaaaatgtatcc
ggccaattgatagtagataatgaggtgtacagcgcatgataatttacacagtaaccaaaatgaaaatactttagtaatt
ataagaaatatagatggtaacgtcatcatcaacaatccaataatatgccggagagtaaacattgacggataaaaca
aaaatgctccgcataactctatcatggcaataacacaaccaaatacttgtaagattcctaaattagtagaaaatacaa
cggatatcgatgtataagtgatctcgagaaataataagaataaagtaatgcccgtaaagataaacatcaacattgtttg
gtaatcattaaaccaattagtatgaagttgaactaatttcacagtagattttattccagtgttatcctcgcatgtatacgtacc
tggtaagatatctttatattctataatcaatgagacatcactatccgataacgaatgaagtctagcactagtatgccattta
cttaatatggtcgtcttggaagttttattataagttaaaatatcatggttgtccaatttccatctaatatactttgtcggattatct
atagtacacggaataatgatggtattattacatgctgtatactctatagtctttgtagatgttataatcataaaagtacagag
gtatatcaacgatattctaactcttgacattttttatttatttaaaatgatacctttgttatttattttattctattttgctaacggtatc
gaatggcataagtttgaaacgagtgaagaaataatttctacttacttattagacgacgtattatacacgggtgttaatggg
gcggtatacacattttcaaataataaactaaacaaaactggtttagctaatactaattatatcacaacatctataaaagt
agaggatgcggataaggatacattagtatgcggaaccaataacggaaatcccaaatgttggaaaatagacggttca
gacgacccaaaacatagaggtagaggatacgctccttatcaaaatagcaaagtaacgataatcagtcacaacgga
tgtgtactatctgacataaacatatcaaaagaaggaattaaacgatggagaagatttgacggaccatgtggttatgattt
atacacggcggataacgtaattccaaaagatggtttacgaggagcattcgtcgataaagatggtacttatgacaaagt
ttacattcttttcactgatactatcggctcaaagagaattgtcaaaattccgtatatagcacaaatgtgcctaaacgacga
aggtggtccatcatcattgtctagtcatagatggtcgacgtttctcaaagtcgaattagaatgtgatatcgacggaagaa
gttatagacaaattattcattctagaactataaaaacagataatgatacgatactatatgtattcttcgatagtccgcattat
gtacctattctatgaataccattaaacaatctttttctacgtcaaaattggaaggatatacaaagcaattgccgtctccag
ctcctggtatatgtctaccagctggaaaagttgttccacataccacgtttgaagtcatagaaaaatataatgtactagatg
atattataaagcctttatctaaccaacctatcttcgaaggaccgtctggtgttaaatggttcgatataaaggagaaggaa
aatgaacatcgggaatatagaatatacttcataaaagaaaattctatatattcgttcgatacaaaatctaaacaaactc
gtagctcgcaagtcgatgcgcgactattttcagtaatggtaacttcgaaaccgttatttatagcagatatagggatagga
gtaggaatgccacaaatgaaaaaaatacttaaaatgtaatcttaatcgagtacaccacacgacaatgaacaaacat
aagacagattatgctggttatgcttgctgcgtaatatgcggtctaattgttggaattatttttacagcgacactattaaaagtt
gtagaacgtaaattagttcatacaccatcaatagataaaacgataaaagatgcatatattagagaagattgtcctactg
actggataagctataataataaatgtatccatttatctactgatcgaaaaacctgggaggaaggacgtaatgcatgca
aagctctaaatccaaattcggatctaattaagatagagactccaaacgagttaagttttttaagaagcattagacgcgg
atattgggtaggagaatccgaaatattaaaccagacaaccccatataattttatagctaagaatgccacgaagaatg
gaactaaaaaacggaaatatatttgtagcacaacgaatactcccaaactgcattcgtgttacactatataacaattaca
ctacatttttatcataccactacttcggttagatgttttagaaaaaaataaatatcgccgtaccgttcttgtttttataaaaata
acaattaacaattatcaaattttttctttaatattttacgtggttgaccattcttggtggtaaaataatctcttagtgttggaatgg
aatgctgtttaatgtttccacactcatcgtatattttgacgtatgtagtcacatcgtttacgcaatagtcagactgtagttctat
catgcttcctacattagaaggaggaacagttttaaagtctcttggttttaatctattaccgttagttttcatgaaatcctttgtttt
atccacttcacattttaaataaatgtccactatacattcttctgttaattttactagatcgtcatgggtcatagaatttataggtt
ccgtagtccatggatccaaactagcaaacttcgcgtatacggtatcgcgattagtgtatacaccaactgtatgaaaatt
aagaaaacagtttaatagatcaacagaaatatttaatcctccgtttgatacagatgcaccatatttatggattttggattca
cacgttgtttgtctgaggggttcgtctagcgttgcttctacataaacttctattcccatatattctttattgtcagaatcgcatac
cgatttatcatcatacactgtttgaaaactaaatggtatacacatcaaaataacaaatactaacgagtacattctgcaat
attgttatcgtaattggaaaaatagtgttcgagtgagttggattatgtgagtattggattgtatattttattttatattttgtaataa
gaataaaatgctaatgtcaagtttattccaatagatgtcttattaaaaacatatataataaataacaatggctgaatggca
taaaattatcgaggatatctcaaaaaataataagttcgaggatgccgccatcgttgattacaagactacaaagaatgtt
ctagctgctattcctaacagaacatttgccaagattaatccgggtgaaattattcctctcatcactaatcgtaatattctaaa
acctcttattggtcagaaatattgtattgtatatactaactctctaatggatgagaacacgtatgctatggagttgcttactg
ggtacgcccctgtatctccgatcgttatagcgagaactcataccgcacttatatttttgatgggtaagccaacaacatcc
agacgtgacgtgtatagaacgtgtagagatcacgctacccgtgtacgcgcaactggtaattaaaataaaaagtaata
ttcatatgtagtgtcaattttaaatgatgatgatgaaatggataatatccatattgacgatgtcaataatgccggtattggca
tacagctcatcgatttttagatttcattcagaggatgtggaattatgttatgggcatttgtattttgataggatctataatgtagt
aaatataaaatataatccgcatattccatatagatataattttattaatcgcacgttaaccgtagatgaactagacgataa
tgtcttttttacacatggttattttttaaaacacaaatatggttcacttaatcctagtttgattgtctcattatcaggaaacttaaa
atataatgatatacaatgctcagtaaatgtatcgtgtctcattaaaaatttggcaacgagtacatctactatattaacatct
aaacataagacttattctctacatcggtccacgtgtattactataataggatacgattctattatatggtataaagatataa
atgacaagtataatggcatctatgattttactgcaatatgtatgctaatagcgtctacattgatagtgaccatatacgtgttt
aaaaaaataaaaatgaactcttaattatgctatgctattagaaatggataaaatcaaaattacggttgattcaaaaattg
gtaatgttgttaccatatcgtataacttggaaaagataactattgatgtcacacctaaaaagaaaaaagaaaaggatgt
attattagcgcaatcagttgctgtcgaagaggcaaaagatgtcaaggtagaagaaaaaaatattatcgatattgaag
atgacgatgatatggatgtagaaagcgcataatacgatctataaaaataagtatataaatactttttatttactgtactctta
ctgtgtagtggtgataccctactcgattatttttttaaaaaaatacttattctgattcttctagccatttccgtgttcgttcgaatg
ccacatcgacgttaaagataggggagtagttgaaatctagttctgcattgttggtacgcacctcaaatgtagtgttggat
atcttcaacgtatagttgttgagtagtgatggttttctaaatagaattctcttcatatcattcttgcacgcgtacatttttagcatc
catcttggaattctagatccttgttctattcccaatggtttcatcaatagaagattaaacatatcgtacgaacacgatggag
agtaatcgtagcaaaagtaagcatttcctttaatctcagatcccggatactggatatattttgcagccaacacgtgcatcc
atgcaacatttcctacatatacccggctatgcaccgcgtcatcatcgactgtacgatacataatgttaccgtgttgcttac
attgctcgtaaaagactttcgtcaatttgtctccttctccgtaaattccagtgggtcttaggcaacaagtatacaattttgctc
cattcatgattacggaattattggctttcataaccagttgctcggccatacgtttactttttgcgtatacatgtcctggtgatat
atcataaagggtatgctcatggccgatgaatggatcaccgtgtttatttggtcctattgcttccatgctactagtatagatca
aatacttgattcctaggtccacacaagctgccaatatagtctgtgttccataatagtttactttcatgatttcattatcggtgta
ttttccaaatacatccactagagcagccgtatgaataatcagatttaccccatctagcgcttctctcaccttatcaaagtcg
tttatatcacattgtatatagtttataaccttaactttcgaggttattggttgtggatcttctacaatatctatgactctgatttcttg
aacatcatctgcactaattaacagttttactatatacctgcctagaaatccggcaccaccagtaaccgcgtacacggcc
attgctgccactcataatatcagactacttattctattttactaaataatggctgtttgtataatagaccacgataatatcaga
ggagttatttactttgaaccagtccatggaaaagataaagttttaggatcagttattggattaaaatccggaacgtatagtt
tgataattcatcgttacggagatattagtcaaggatgtgattccataggcagtccagaaatatttatcggtaacatctttgt
aaacagatatggtgtagcatatgtttatttagatacagatgtaaatatatctacaattattggaaaggcgttatctatttcaa
aaaatgatcagagattagcgtgtggagttattggtatttcttacataaatgaaaagataatacattttcttacaattaacga
gaatggcgtttgatatatcagttaatgcgtctaaaacaataaatgcattagtttacttttctactcagcaaaataaattagtc
atacgtaatgaagttaatgatacacactacactgtcgaatttgatagggacaaagtagttgacacgtttatttcatataat
agacataatgacaccatagagataagaggggtgcttccagaggaaactaatattggttgcgcggttaatacgccggt
tagtatgacttacttgtataataagtatagttttaaactgattttagcagaatatataagacacagaaatactatatccggc
aatatttattcggcattgatgacactagatgatttggctattaaacagtatggagacattgatctattatttaatgagaaactt
aaagtagactccgattcgggactatttgactttgtcaactttgtaaaggatatgatatgttgtgattctagaatagtagtagc
tctatctagtctagtatctaaacattgggaattgacaaataaaaagtataggtgtatggcattagccgaacatatatctga
tagtattccaatatctgagctatctagactacgatacaatctatgtaagtatctacgcggacacactgagagcatagag
gataaatttgattattttgaagacgatgattcgtctacatgttctgccgtaaccgacagggaaacggatgtataatttttttta
tagcgtgaaggatatgataaaaaatataattgttgtatttatcccattccaatcaccttatatgattctgtaacacaatgaa
ggagtctcatagatgtatagaggtcagatactggtttgataaactgtttattccacatgagtatgtttgactttatggttagac
ccgcatactttaacaaatcactgaaaattggagttaggtattgacctctcagaatcagttgccgttctggaacattaaatg
tattttttatgatatactccaacgcatttatgtgggcatacaacaagtcattactaatggagtattccaagagttttagttgtct
agtatttaacaagagaagagatttcaacagactgtttatgaactcgaatgccgcctcattgtcgcttatattgatgatgtcg
aattctcccaatatcatcaccgatgagtagctcatcttgttatcgggatccaagttttctaaagatgtcattaaaccctcgat
catgaatggatttatcatcatcgtttttatgttggacatgagcttagtccgtttgtccacatctatagacgacgatttctgaatt
attttatatatccctctctttaactccaggaacttgtcaggatggtctactttaatatgttctcgtctaagagatgaaaatctttg
gatggttgcacgcgacttttctctaaaggatgacgttgcccaagatcctctcttaaatgaatccatcttatccttggacaag
atggacagtctattttccttagatggtttaatatttttgttacccatgatctataaaggtagacctaatcgtctcggatgaccta
tatatttattttcagttttattatacgcataaattgtaaaaaatatgttaggtttacaaaaatgtctcgtggggcattaatcgtttt
tgaaggattggacaaatctggaaaaacaacacaatgtatgaacatcatggaatctataccggcaaacacgataaa
atatcttaactttcctcagagatccactgtcactggaaagatgatagatgactatctaactcgtaaaaaaacctataatg
atcatatagttaatctattattttgtgcaaatagatgggagtttgcatcttttatacaagaacaactagaacagggaattact
ttaatagttgatagatacgcgttctctggagtagcgtatgccgccgctaaaggcgcgtcaatgactctcagtaagagtta
tgaatctggattgcctaaacccgacttagttatattcttggaatctggtagcaaagaaattaatagaaacgtcggcgag
gaaatttatgaagatgttacattccaacaaaaggtattacaagaatataaaaaaatgattgaagaaggagatattcatt
ggcaaattatttcttctgaattcgaggaagatgtaaagaaggagttgattaagaatatagttatagaggctatacacac
ggttactggaccagtggggcaactgtggatgtaatagtgaaattacattttttataaatagatgttagtacagtgttataaa
tggatgaagcatattactctggcaacttggaatcagtactcggatacgtgtccgatatgcataccgaactcgcatcaat
atctcaattagttattgccaagatagaaactatagataatgatatattaaacaaggacattgtaaattttatcatgtgtaga
tcaaacttggataatccatttatctctttcctagatactgtatatactattatagatcaagagaactatcagaccgaattgatt
aattcattagacgacaatgaaattatcgattgtatagttaataagtttatgagcttttataaggataacctagaaaatatag
tagatgctatcattactctaaaatatataatgaataatccagattttaaaactacgtatgccgaagtactcggttccagaat
agccgatatagatattaaacaagtgatacgtgagaatatactacaattgtctaatgatatccgcgaacgatatttgtgaa
aaatattaaaaaaaaatactttttttattaaatgacgtcgcttcgcgaatttagaaaattatgctgtgatatatatcacgcat
caggatataaagaaaaatctaaattaattagagactttataacagatagggatgataaatatttgatcattaagctattg
cttcccggattagacgatagaatttataacatgaacgataaacaaattataaaattatatagtataatatttaaacaatct
caggaagatatgctacaagatttaggatacggatatataggagacactattaggactttcttcaaagagaacacaga
aatccgtccacgagataaaagcattttaactttagaagacgtggatagtttcttaactacgttatcatccgtaactaaaga
atcgcatcaaataaaattattgactgatatcgcatccgtttgtacatgtaatgatttaaaatgtgtagtcatgcttattgataa
agatctaaaaattaaagcgggtcctcggtacgtacttaacgctattagtcctaatgcctatgatgtgtttagaaaatctaat
aacttgaaagagataatagaaaatgcatctaaacaaaatctagactctatatctatttctgttatgactccaattaatccc
atgttagcggaatcgtgtgattctgtcaataaggcgtttaaaaaatttccatcaggaatgtttgcggaagtcaaatacgat
ggtgaaagagtacaagttcataaaaataataacgagtttgccttctttagtagaaacatgaaaccagtactctctcata
aagtggattatctcaaagaatacataccgaaagcatttaaaaaagctacgtctatcgtattggattctgaaattgttcttgt
agacgaacataatgtaccgctcccgtttggaagtttaggaatacacaaaaagaaagaatataaaaactctaacatgt
gtttgttcgtgtttgactgtttgtactttgatggattcgatatgacggacattccattgtacgaacgaagatcttttctcaaaga
tgttatggttgaaatacccaatagaatagtattctcagagttgacgaatattagtaacgagtctcagttaactgacgtattg
gatgatgcactaacgagaaaattagaaggattggtcttaaaagatattaatggagtatacgaaccgggaaagagaa
gatggttaaaaataaagcgagactatttgaacgagggttccatggcagattctgccgatttagtagtactaggtgcttac
tatggtaaaggagcaaagggtggtatcatggcagtctttctaatgggttgttacgacgatgaatccggtaaatggaaga
cggttaccaagtgttcaggacacgatgataatacgttaagggttttgcaagaccaattaacgatggttaaaattaacaa
ggatcccaaaaaaattccagagtggttggtagttaataaaatctatattcccgattttgtagtagaggatccgaaacaat
ctcagatatgggaaatttcaggagcagagtttacatcttccaagtcccataccgcaaatggaatatccattagatttcct
agatttactaggattagagaagataaaacgtggaaagaatctactcatctaaacgatttagtaaacttgactaaatctta
atagttacatacaaactgaaaattaaaataacactatttagttggtggtcgccatggatggtgttattgtatactgtctaaa
cgcgttagtaaaacatggcgaggaaataaatcatataaaaaatgatttcatgattaaaccatgttgtgaaagagtttgt
gaaaaagtcaagaacgttcacattggcggacaatctaaaaacaatacagtgattgcagatttgccatatatggataat
gcggtatccgatgtatgcaattcactgtataaaaagaatgtatcaagaatatccagatttgctaatttgataaagatagat
gacgatgacaagactcctactggtgtatataattattttaaacctaaagatgttattcctgttatcatatctataggaaagg
ataaagatgtctgtgaactattaatctcatcagacatatcgtgtgcatgcgtggagttaaattcatatcacgtagccattctt
cccatggatgtttccttttttaccaaaggaaatgcatcattgattattctcctgtttgatttctctatcgatgcagcacctctctta
agaagtgtaaccgataataatgttattatatctagacaccagcgtctacatgacgagcttccgagttccaattggttcaa
gttttacataagtataaagtccgactattgttctatattatatatggttgttgatggatctgtgatgcatgcgatagctgataat
agaactcacgcaattattagcaaaaatatattagacaatactacgattaacgatgagtgtagatgctgttattttgaacc
acagattaggattcttgatagagatgagatgctcaatggatcatcgtgtgatatgaacagacattgtattatgatgaattt
acctgatgtaggcaaatttggatctagtatgttggggaaatatgaacctgacatgattaagattgctctttcggtggctggt
aatttaataagaaatcgagactacattcccgggagacgaggatatagctactacgtttacggtatagcctctagataatt
tttttaagcacgaaataaaaaacataattttaaaccaatctatttcatactattttgtgtgatcaccatggacataaagata
gatattagtatttctggtgataaatttacggtgactactaggagggaaaatgaagaaagaaaaaaatatctacctctcc
aaaaagaaaaaactactgatgttatcaaacctgattatcttgagtacgatgacttgttagatagagatgagatgtttacta
ttctagaggaatattttatgtacagaggtctattaggcctcagaataaaatatggacgactctttaacgaaattaaaaaat
tcgacaatgatgcggaagaacaattcggtactatagaagaactcaagcagaaacttagattaaattctgaagaggg
agcagataactttatagattatataaaggtacaaaaacaggatatcgtcaaacttactgtatacgattgcatatctatgat
aggattgtgtgcatgcgtggtagatgtttggagaaatgagaaactgttttctagatggaaatattgtttacgagctattaaa
ctgtttattaatgatcacatgcttgataagataaaatctatactgcagaatagactagtatatgtggaaatgtcatagaaa
gttaaaagttaatgagagcaaaaatatataaggttgtattccatatttgttattttttctgtaatagttagaaaaatacattcg
atggtctatctaccagattattatgtgttataaggtactttttctcataataaactagagtatgagtaagatagtgtttttcaaa
acatataaatctaaaattgatggatgagatatacagctattaatttcgaaaatatattttaatctgataactttaaacatgg
atttttgatggtggtttaacgttttaaaaaaagattttgttattgtagtatatgataatattaaaagatggatataaagaatttg
ctgactgcatgtactattttttacattactacattggctacggcagatatacctactccgccaccaacgggtcatgtgaca
agggagaatatcttgataagaggcataatcaatgttgtaatcggtgtccacctggagaatttgccaaggttagatgtaat
ggtaacgataacacaaaatgtgaacgctgcccacctcatacatataccacaatcccaattattctaatggatgtcatca
atgtagaaaatgcccaaccggatcatttgataaggtaaagtgtaccggaacacagaacagtaaatgttcgtgtcttcct
ggttggtattgtgctactgattcttcacagactgaagattgttgaaattgtgtaccaaaaaggagatgtccatgcggatac
tttggtggaatagatgaacaaggaaatcctatttgtaaatcgtgttgtgttggtgaatattgcgactacctacgtaattatag
acttgatccatttcctccatgcaaactatctaaatgtaattaattatgattttgatgataatgttaccatacattatatcgctact
tggttagtgtattattcagtatgaagacctattaataattacttatcttttgacgatcttgttataattataatataaaaatactta
tggcatagtaactcataattgctgacgcgataaattcgtaataatctgttttgttcaaatttttataaggaatctacaggcat
aaaaataaaaatataatttataatatactcttacagcgcgccatcatgaataacagcagtgaattgattgctgttattaat
ggatttagaaatagtggacgattttgtgatattagtatagttattaatgatgaaaggataaacgctcataaactcatcctat
ctggagcctccgaatatttttccattctgttttccaataattttatcgattctaatgaatacgaagttaatctaagtcatttagatt
atcaaagcgttaacgatttgatcgattacatttatgggatacctttgagcctaactaacgataacgtgaaatatattctttca
accgctgattttttacaaattggatctgctattacggagtgtgaaaattacatacttaaaaatctttgttctaaaaactgtatc
gatttctacatatacgctgataaatataataacaagaaaatagaatcagcgtcgtttaacacaatattacaaaatattttg
agactcatcaacgatgaaaactttaaatacttaacagaggaatcaatgataaaaattttaagcgatgatatgttaaatat
aaaaaatgaggattttgcaccactaattctcattaaatggttagagagtactcaacaatcatgcaccgtcgagttactta
gatgcctcagaatatcattgctttccccacaagttataaaatcactttatagtcatcaactggttagttcaatctacgaatgt
ataacattcttaaacaatatagcattcttggatgaatcatttcctagataccatagcatcgagttgatatctatcggtataag
taattcgcatgataagatttccataaactgctacaatcataaaaaaaatacatgggaaatgatatcttcacgtagatata
ggtgtagtttcgcagtggccgtcctggataatattatctatatgatgggtggatatgatcagtccccgtatagaagttcaa
aggttatagcgtacaatacatgtacaaattcttggatatatgatataccagagctaaaatatcctcgttctaattgtgggg
gactggctgatgacgaatacatttattgtataggcggcatacgcgatcaggattcatcgttgacatctagtattgataaat
ggaagccatcaaaaccatattggcagaagtatgctaaaatgcgcgaaccaaaatgtgatatgggggttgcgatgtta
aacggattaatatatgtcatgggtggaatcgttaaaggtgacacgtgtaccgacgcactagagagtttatcagaagat
ggatggatgaagcatcaacgtcttccaataaaaatgtccaatatgtcgacgattgttcatgatggcaagatttatatatct
ggaggttacaacaatagtagtgtagttaatgtaatatcgaatctagtccttagctataatccgatatatgatgaatggacc
aaattatcatcattaaacattcctagaattaatcccgctctatggtcagcgcataataaattatatgtaggaggaggaat
atctgatgatgttcgaactaatacatctgaaacatacgataaagaaaaagattgttggacattggataatggtcacgtgt
taccacgcaattatataatgtataaatgcgaaccgattaaacataaatatccattggaaaaaacacagtacacgaatg
attttctaaagtatttggaaagttttataggtagttgatagaacaaaatacataattttgtaaaaataaatcactttttatacta
atatgacacgattaccaatacttttgttactaatatcattagtatacgctacaccttttcctcagacatctaaaaaaataggt
gatgatgcaactctatcatgtaatcgaaataatacaaatgactacgttgttatgagtgcttggtataaggagcccaattcc
attattcttttagctgctaaaagcgacgtcttgtattttgataattataccaaggataaaatatcttacgactctccatacgat
gatctagttacaactatcacaattaaatcattgactgctagagatgccggtacttatgtatgtgcattctttatgacatcaac
tacaaatgacactgataaagtagattatgaagaatactccacagagttgattgtaaatacagatagtgaatcgactata
gacataatactatctggatctacacattcaccggaaactagttctaagaaacctgattatatagataattctaattgctcgt
cggtattcgaaatcgcgactccggaaccaattactgataatgtagaagatcatacagacaccgtcacatacactagtg
atagcattaatacagtaagtgcatcatctggagaatccacaacagacgagactccggaaccaattactgataaaga
agatcatacagttacagacactgtctcatacactacagtaagtacatcatctggaattgtcactactaaatcaaccacc
gatgatgcggatctttatgatacgtacaatgataatgatacagtaccaccaactactgtaggcggtagtacaacctctat
tagcaattataaaaccaaggactttgtagaaatatttggtattaccgcattaattatattgtcggccgtggcaattttctgtat
tacatattatatatataataaacgttcacgtaaatacaaaacagagaacaaagtctagatttttgacttacataaatgtct
gggatagtaaaatctatcatattgagcggaccatctggtttaggaaagacagccatagccaaaagactatgggaata
tatttggatttgtggtgtcccataccactagatttcctcgtcctatggaacgagaaggtgttgattaccattacgttaacaga
gaggccatctggaagggaatagccgccggaaactttctagaacatactgagtttttaggaaatatttacggaacttcta
aaacagctgtgaatacagcggctattaataatcgtatttgtgtgatggatctaaacatcgacggtgttagaagtcttaaa
aatacgtacctaatgccttactcggtgtatataagacctacctctcttaaaatggttgagaccaagcttcgttgtagaaac
actgaagctaacgatgagattcatcgtcgcgtgatattggcaaaaacggatatggatgaggccaacgaagcaggtct
attcgacactattatcattgaagatgatgtgaatttagcatatagtaagttaattcagatactacaggaccgtattagaatg
tattttaacactaattagagacttaagacttaaaacttgataattaataatataactcgtttttatatgtggctatttcaacgtct
aatgtattagttaaatattaaaacttaccacgtaaaacttaaaatttaaaatgatatttcattgacagatagatcacacatt
atgaactttcaaggacttgtgttaactgacaattgcaaaaatcaatgggtcgttggaccattaataggaaaaggtggatt
cggtagtatttatactactaatgacaataattatgtagtaaaaatagagcccaaagctaacggatcattatttaccgaac
aggcattttatactagagtacttaaaccatccgttatcgaagaatggaaaaaatctcacaatataaagcacgtaggtctt
atcacgtgcaaggcatttggtctatacaaatccattaatgtggaatatcgattcttggtaattaatagattaggtgcagatc
tagatgcggtgatcagagccaataataatagattaccaaaaaggtcggtgatgttgatcggaatcgaaatcttaaata
ccatacaatttatgcacgagcaaggatattctcacggagatattaaagcgagtaatatagtcttggatcaaatagataa
gaataaattatatctagtggattacggattggtttctaaattcatgtctaatggagaacatgttccatttataagaaatccaa
ataaaatggataacggtactctagaatttacacctatagattcgcataaaggatacgttgtatctagacgtggagatcta
gaaacacttggatattgtatgattagatggttgggaggtatcttgccatggactaagatatctgaaacaaagaattgtgc
attagtaagtgccacaaaacagaaatatgttaacaatactgcgactttgttaatgaccagtttgcaatatgcacctagag
aattgctgcaatatattaccatggtaaactctttgacatattttgaggaacccaattatgacgagtttcggcacatattaatg
cagggtgtatattattaagtgtggtgtttggtcgatgtaaaatttttgtcgataaaaattaaaaaataacttaatttattattgat
ctcgtgtgtacaaccgaaatcatggcgatgttttacgcacacgctctcggtgggtacgacgagaatcttcatgcctttcct
ggaatatcatcgactgttgccaatgatgtcaggaaatattctgttgtgtcagtttataataacaagtatgacattgtaaaag
acaaatatatgtggtgttacagtcaggtgaacaagagatatattggagcactgctgcctatgtttgagtgcaatgaatat
ctacaaattggagatccgatccatgatcaagaaggaaatcaaatctctatcatcacatatcgccacaaaaactactat
gctctaagcggaatcgggtacgagagtctagacttgtgtttggaaggagtagggattcatcatcacgtacttgaaaca
ggaaacgctgtatatggaaaagttcaacatgattattctactatcaaagagaaggccaaagaaatgaatgcacttagt
ccaggacctatcattgattaccacgtctggataggagattgtatctgtcaagttactgctgtggacgtacatggaaagga
aattatgagaatgagattcaaaaagggtgcggtgcttccgatcccaaatctggtaaaagttaaacttggggagaatga
tacagaaaatctttcttctactatatcggcggcaccatcgaggtaaccacctctctggaagacagcgtgaataatgtact
catgaaacgtttggaaactatacgccatatgtggtctgtcgtatatgatcattttgatattgtgaatggtaaagaatgctgtt
atgtgcatacgcatttgtctaatcaaaatcttataccgagtactgtaaaaacaaatttgtacatgaagactatgggatcat
gcattcaaatggattccatggaagctctagagtatcttagcgaactgaaggaatcaggtggatggagtcccagacca
gaaatgcaggaatttgaatatccagatggagtggaagacactgaatcaattgagagattggtagaggagttcttcaat
agatcagaacttcaggctggtgaatcagtcaaatttggtaattctattaatgttaaacatacatctgtttcagctaagcaac
taagaacacgtatacggcagcagcttcctttatactctcatcttttaccaacacaaagggtggatatttgttcattggagtt
gataataatacacacaaagtaattggattcacggtgggtcatgactacctcagactggtagagaatgatatagaaaa
gcatatcaaaagacttcgtgttgtgcatttctgtgagaagaaagaggacatcaagtacacgtgtcgattcatcaaggta
tataaacctggggatgaggctacctcgacatacgtgtgcgctatcaaagtggaaagatgctgttgtgctgtgtttgcaga
ttggccagaatcatggtatatggatactaatggtatcaagaagtattctccagatgaatgggtgtcacatataaaatttta
attaatgtaatagagaacaaataataaggttgtaatatcatatagacaataactaacaattaattagtaactgttatctctt
ttttaactaaccaactaactatatacctattaatacatcgtaattatagttcttaacatctattaatcattaattcgcttctttaatt
ttttataaactaacattgttaattgaaaagggataacatgttacagaatataaattatatatggatttttttaaaaaggaaat
acttgactggagtatatatttatctcttcattatatagcacgcgtgttttccaatttttccacatcccatataatacaggattata
atctcgttcgaacatacgagaaagtggataaaacaatagttgattttttatctaggttgccaaatttattccatattttagaat
atggggaaaatattctacatatttattctatggatgatgctaatacgaatattataattttttttctagatagagtattaaatatt
aataagaacgggtcatttatacacaatctcaggttatcatcatccattaatataaaagaatatgtatatcaattagttaata
atgatcatccagataataggataagactaatgcttgaaaatggacgtagaacaagacattttttgtcctatatatcagat
acagttaatatctatatatgtattttaataaatcatggattttatatagatgccgaagacagttacggttgtacattattacata
gatgtatatatcactataagaaatcagaatcagaatcatacaatgaattaattaagatattgttaaataatggatcagat
gtagataaaaaagatacgtacggaaacacaccttttatcctattatgtaaacacgatatcaacaacgtggaattgtttg
agatatgtttagagaatgctaatatagactctgtagactttaatagatatacacctcttcattatgtctcatgtcgtaataaat
atgattttgtaaagttattaatttctaaaggagcaaatgttaatgcgcgtaatagattcggaactactccattttattgtggaa
ttatacacggtatctcgcttataaaactatatttggaatcagacacagagttagaaatagataatgaacatatagttcgtc
atttaataatttttgatgctgttgaatctttagattatctattatccagaggagttattgatattaactatcgtactatatacaacg
aaacatctatttacgacgctgtcagttataatgcgtataatacgttggtctatctattaaacagaaatggtgattttgagac
gattactactagtggatgtacatgtatttcggaagcagtcgcaaacaacaacaaaataataatggaagtactattgtct
aaacgaccatctttgaaaattatgatacagtctatgatagcaattactaaacataaacagcataatgcagatttattgaa
aatgtgtataaaatatactgcgtgtatgaccgattatgatactcttatagatgtacagtcgctacagcaatataaatggtat
attttaaaatgtttcgatgaaatagatatcatgaagagatgttatataaaaaataaaactgtattccaattagttttttgtatc
aaagacattaatactttaatgagatacggtaaacatccttctttcgtgaaatgcactagtctcgacgtatacggaagtcgt
gtacgtaatatcatagcatctattagatatcgtcagagattaattagtctattatccaagaagctggatcctggagataaa
tggtcgtgttttcctaacgaaataaaatataaaatattggaaaactttaacgataacgaactatccacatatctaaaaat
cttataaacactattaaaatataaaatctaagtaggataaaatcacactacatcattgtttccttttagtgctcgacagtgta
tactatttttaacactcataaataaaaatgaaaacgatttccgttgttacgttgttatgcgtactacctgctgttgtttattcaac
atgtactgtacccactatgaataacgctaaattaacgtctaccgaaacatcgtttaatgataaacagaaagttacgttta
catgtgatcagggatatcattcttcggatccaaatgctgtctgcgaaacagataaatggaaatacgaaaatccatgca
aaaaaatgtgcacagtttctgattacatctctgaattatataataaaccgctatacgaagtgaattccaccatgacacta
agttgcaacggcgaaacaaaatattttcgttgcgaagaaaaaaatggaaatacttcttggaatgatactgttacgtgtc
ctaatgcggaatgtcaacctcttcaattagaacacggatcgtgtcaaccagttaaagaaaaatactcatttggggaata
tatgactatcaactgtgatgttggatatgaggttattggtgcttcgtacataagttgtacagctaattcttggaatgttattcca
tcatgtcaacaaaaatgtgatatgccgtctctatctaatggattaatttccggatctacattttctatcggtggcgttatacat
cttagttgtaaaagtggttttacactaacggggtctccatcatccacatgtatcgacggtaaatggaatcccgtactccca
atatgtgtacgaactaacgaagaatttgatccagtggatgatggtcccgacgatgagacagatttgagcaaactctcg
aaagacgttgtacaatatgaacaagaaatagaatcgttagaagcaacttatcatataatcatagtggcgttaacaatta
tgggcgtcatatttttaatctccgttatagtattagtttgttcctgtgacaaaaataatgaccaatataagttccataaattgct
accgtaaatataaatccgttaaaataatgaataattaataacgaacaagtatcaaaagattaaagaattatagctaga
atcaattgagatgtcttcttcagtggatgttgatatctacgatgccgttagagcatttttactcaggcactattataacaaga
gatttattgtgtatggaagaagtaacgccatattacataatatatacaggctatttacaagatgcgccgttataccgttcg
atgatatagtacgtactatgccaaatgaatcacgtgttaaacaatgggtgatggatacacttaatggtataatgatgaat
gaacgcgatgtttctgtaagcgttggcaccggaatactattcatggaaatgtttttcgattacaataaaaatagtatcaac
aatcaactaatgtatgatataattaatagcgtatctataattctagctaatgagagatatagaagcgcttttaacgacgat
ggtatatacatccgtagaaatatgattaacaagttgtacggatacgcatctctaactactattggcacgatcgctggagg
tgtttgttattatctgttgatgcatctagttagtttgtataaataattatttcaatatactagttaaaattttaagattttaaatgtata
aaaaactaataacgtttttatttgtaataggtgcattagcatcctattcgaataatgagtacactccgtttaataaactgagt
gtaaaactctatatagatggagtagataatatagaaaattcatatactgatgataataatgaattggtgttaaattttaaag
agtacacaatttctattattacagagtcatgcgacgtcggatttgattccatagatatagatgttataaacgactataaaat
tattgatatgtataccattgactcgtctactattcaacgcagaggtcacacgtgtagaatatctaccaaattatcatgccat
tatgataagtacccttatattcacaaatatgatggtgatgagcgacaatattctattactgcagagggaaaatgctataa
aggaataaaatatgaaataagtatgatcaacgatgatactctattgagaaaacatactcttaaaattggatctacttatat
atttgatcgtcatggacatagtaatacatattattcaaaatatgatttttaaaaatttaaaatatattatcacttcagtgacagt
agtcaaataacaaacaacaccatgagatatattataattctcgcagttttgttcattaatagtatacacgctaaaataact
agttataagtttgaatccgtcaattttgattccaaaattgaatggactggggatggtctatacaatatatcccttaaaaatta
tggcatcaagacgtggcaaacaatgtatacaaatgtaccagaaggaacatacgacatatccgcatttccaaagaat
gatttcgtatctttctgggttaaatttgaacaaggcgattataaagtggaagagtattgtacgggactatgcgtcgaagta
aaaattggaccaccgactgtaacattgactgaatacgacgaccatatcaatttgtacatcgagcatccgtatgctacta
gaggtagcaaaaagattcctatttacaaacgcggtgacatgtgtgatatctacttgttgtatacggctaacttcacattcg
gagattctaaagaaccagtaccatatgatatcgatgactacgattgcacgtctacaggttgcagcatagactttgtcac
aacagaaaaagtgtgcgtgacagcacagggagccacagaagggtttctcgaaaaaattactccatggagttcgaa
agtatgtctgacacctaaaaagagtgtatatacatgcgcaattagatccaaagaagatgttcccaatttcaaggacaa
aatggccagagttatcaagagaaaatttaataaacagtctcaatcttatttaactaaatttctcggtagcacatcaaatg
atgttaccacttttcttagcatgcttaacttgactaaatattcataactaatttttattaatgatacaaaaacgaaataaaact
gcatattatacactggttaacgcccttataggctctaaccattttcaagatgaggtccctgattatagtccttctgttcccctc
tatcatctactccatgtctattagacaatgtgagaagactgaagaggaaacatggggattgaaaatagggttgtgtata
attgccaaagatttctatcccgaaagaactgattgcagtgttcatctcccaactgcaagtgaaggattgataactgaag
gcaatggattcagggatatacgaaacaccgataaattataaaaaaagcaatgtgtccgctgtttccgttaataatacta
ttttcgtaactggcggattattcataaataactctaatagcacgatcgtggttaacaatatggaaaaacttgacatttataa
agacaaacaatggtcgattatagaaatgcctatggctagggtatatcacggcatcgactcgacatttggaatgttatatt
ttgccggaggtctatccgttaccgaacaatatggtaatttagagaaaaacaacgagatatcttgttacaatcctagaac
gaataagtggtttgatatttcatatactatttataagatatccatatcatcattgtgtaaactaaataacgtcttctatgtattta
gtaaggacattggatatgtggaaaagtatgatggtgcatggaagttagtacatgatcgtctccccgctataaaggcatt
atcaacttctccttattgattgaaaatgaaaatataaatagtttttatgtatagcagtattaccctatagttttattgcttactact
aacatggatacagatgttacaaatgtagaagatatcataaatgaaatagatagagagaaagaagaaatactaaaa
aatgtagaaattgaaaataataaaaacattaacaagaatcatccaagtggatatattagagaagcactcgttattaat
accagtagtaatagtgattccattgataaagaagttatagaatgtatctgtcacgatgtaggaatatagatcatatctact
aatttttataatcgatacaaaacataaaaaacaactcgttattacatagcaggcatggaatccttcaagtattgttttgata
acgatggcaagaaatggattatcggaaatactttatattctggtaattcaatactatataaggtcagaaaaaatttcacta
gttcgttctacaattacgtaatgaagatagatcacaaatcacacaagccattgttgtctgaaatacgattctatatatctgt
attggatcctttgactatcgacaactggacacgggaacgtggtataaagtatttggctattccagatctgtatggaattgg
agaaaccgatgattatatgttcttcgttataaagaatttgggaagagtattcgccccaaaggatactgaatcagtcttcg
aagcatgcgtcactatgataaacacgttagagtttatacactctcaaggatttacccatggaaaaatagaaccgagga
atatactgattagaaataaacgtctttcactaattgactattctagaactaacaaactatacaagagtggaaactcacat
atagattacaacgaggacatgataacttcaggaaatatcaattatatgtgtgtagacaatcatcttggagcaacagtttc
aagacgaggagatttagaaatgttgggatattgcatgatagaatggttcggtggcaaacttccatggaaaaacgaaa
gtagtataaaagtaataaaacaaaaaaaagaatataaaaaatttatagctactttctttgaggactgttttcctgaagga
aatgaacctctggaattagttagatatatagaattagtatacacgttagattattctcaaactcctaattatgacagactac
gtaaactgtttatacaagattgaaattatattcttttttttatagagtgtggtagtgttacggatatttaatattagactatctctat
cgcgctacacgaccaatatcgattactatggatatcttcagggaaatcgcatcttctatgaaaggagagaatgtattcat
ttctccagcgtcaatctcgtcagtattgacaatactgtattatggagctaatggatccactgctgaacagctatcaaaata
tgtagaaaaggaggagaacatggataaggttagcgctcaaaatatctcattcaaatccataaataaagtatatgggc
gatattctgccgtgtttaaagattcctttttgagaaaaattggcgataagtttcaaactgttgacttcactgattgtcgcactat
agatgcaatcaacaagtgtgtagatatctttactgaggggaaaatcaatccactattggatgaaccattgtctcctgata
cctgtctcctagcaattagtgccgtatactttaaagcaaaatggttgacgccattcgaaaaggaatttaccagtgattatc
ccttttacgtatctccgacggaaatggtagatgtaagtatgatgtctatgtacggcaaggcatttaatcacgcatctgtaa
aggaatcattcggcaacttttcaatcatagaactgccatatgttggagatactagtatgatggtcattcttccagacaaga
ttgatggattagaatccatagaacaaaatctaacagatacaaattttaagaaatggtgtaactctctggaagctacgttt
atcgatgttcacattcccaagtttaaggtaacaggctcgtataatctggtggatactctagtaaagtcaggactgacaga
ggtgttcggttcaactggagattatagcaatatgtgtaattcagatgtgagtgtcgacgctatgatccacaaaacgtatat
agatgtcaatgaagagtatacagaagcagctgcagcaacttgtgcactggtgtcagactgtgcatcaacaattacaa
atgagttctgtgtagatcatccgttcatctatgtgattaggcatgttgatggaaaaattcttttcgttggtagatattgctctcc
gacaactaattgttaaccattttttttaaaaaatagaaaaaacatgtggtattagtgcaggtcgttattcttccaattgcaatt
ggtaagatgacggccaactttagtacccacgtcttttcaccacagcactgtggatgtgacagactgaccagtattgatg
acgtcagacaatgtttgactgaatatatttattggtcgtcctatgcataccgcaacaggcaatgcgctggacaattgtatt
ccacactcctctcttttagagatgatgcggaattagtgttcatcgacattcgcgagctggtaaaaaatatgccgtgggat
gatgtcaaagattgtgcagaaatcatccgttgttatataccggatgagcaaaaaaccatcagagagatttcggccatc
atcggactttgtgcatatgctgctacttactggggaggtgaagaccatcccactagtaacagtctgaacgcattgtttgtg
atgcttgagatgctcaattacgtggattataacatcatattccggcgtatgaattgatgagttgtacatcttgacattttcttctt
tcttctcttctccctttcccagaaacaaactttttttacccactataaaataaaatgagtatactacctgttatatttctttctatat
ttttttattcttcattcgttcagacttttaacgcgcctgaatgtatcgacaaagggcaatattttgcatcattcatggagttaga
aaacgagccagtaatcttaccatgtcctcaaataaatacgctatcatccggatataatatattagatattttatgggaaaa
acgaggagcggataatgatagaattataccgatagataatggtagcaatatgctaattctgaacccgacacaatcag
actctggtatttatatatgcattaccacgaacgaaacctactgtgacatgatgtcgttaaatttgacaatcgtgtctgtctca
gaatcaaatatagatcttatctcgtatccacaaatagtaaatgagagatctactggcgaaatggtatgtcccaatattaa
tgcatttattgctagtaacgtaaacgcagatattatatggagcgggcatcgacgccttagaaataagagacttaaaca
acggacacctggaattattaccatagaagatgttagaaaaaatgatgctggttattatacatgtgttttagaatatatatac
ggtggcaaaacatataacgtaaccagaattgtaaaattagaggtacgggataaaataataccttctactatgcaatta
ccagatggcattgtaacttcaataggtagtaatttgactattgcatgcagagtatcgttgagacctcccacaacggatgc
agacgtcttttggataagtaatggtatgtattacgaagaagatgatggggacggaaacggtagaataagtgtagcaa
ataaaatctatatgaccgataagagacgtgttattacatcccggttaaacattaatcctgtcaaggaagaagatgctac
aacgtttacgtgtatggcgtttactattcctagcatcagtaaaacagttactgttagtataacgtgaatgtatgttgttacattt
ccatgtcaattgagtttataagaatttttatacattatcttccaacaagcaattgacgaacgtattgctatgattaactccca
cgatactatgcatattattaatcattaacttgcagactatacctagagctattttgacatactcgtgttcttgtgtaattgcagt
atctatattattaaagtacgtaaatctagctatagttttattatttaattttagataatataccgtctccttatttttaaaaattgcc
acatcctttattaaatcatgaatgggaatttctatgtcatagttaatatattgtgaacaacaagagcagatatctataggaa
agggtggaatgcgatacattgatctatgtagttttaaaacacacgcaaactttgaagaatttatataaatcattccatcga
tacatccttctatgttgagatgtatatatccaggaattcgtttattaatatcgggaaatgtataaactaaaacattgcccgg
aagcggagcttctaccggagttatatcagtttttaacttacaaaatgtaaccaatacctttgcatgacttgttttgttcggca
acgttagtttaaacttgacgaatggattaattacaatagcatgatccgcgcatctattaagtttttttactttaacgcccttgta
tgtttttacagagactttatctaaatttctagtgcttgtatgtgttataaatataacgggatatagaactgaatcacctacctta
gatacccaattacattttatcagatccagataataaacaaattttgtcgccctaactaattctatattgttatatattttacaatt
ggttatgatatcatgtaataacttggaatctaacgcacatcgtcgtacgtttatacaattgtgatttagtgtagtatatctaca
catgtatttttccgcgctatagtattctggactagtgataaaactatcgttatatctgtcttcaatgaactcatcgagatattgc
tctctgtcatattcatacacctgcataaactttctagacatcttacaatccgtgttattttaggatcatatttacatatttacggg
tatatcaaagatgttagattagttaatgggaatcgtctataataatgaatattaaacaattatatgaggacttttaccacaa
agcatcataaaaatgagtcgtcgtctgatttatgttttaaatatcaaccgcgaatcaactcataaaatacaagagaatg
aaatatatacatattttagtcattgcaatatagaccatacttctacagaacttgattttgtagttaaaaactatgatctaaac
agacgacaacctgtaactgggtatactgcactacactgctatttgtataataattactttacaaacgatgtactgaagata
ttattaaatcatggagtggatgtaacgatgaaaaccagtagcggacgtatgcctgtttatatattgcttactagatgttgca
atatttcacatgatgtagtgatagatatgatagacaaagataaaaaccacttattacatagagactattccaacctatta
ctagagtatataaaatctcgttacatgttattaaaggaagaggatatcgatgagaacatagtatccactttattagataag
ggaatcgatcctaactttaaacaagacggatatacagcgttacattattattatttgtgtctcgcacacgtttataaaccag
gtgagtgtagaaaaccgataacgataaaaaaggccaagcgaattatttctttgtttatacaacatggagctaatctaaa
cgcgttagataattgtggtaatacaccattccatttgtatcttagtattgaaatgtgtaataatattcatatgactaaaatgct
gttgacttttaatccgaatttcgaaatatgtaataatcatggattaacgcctatactatgttatataacttccgactacataca
acacgatattcttgttatgttaatacatcactatgaaacaaatgttggagaaatgccgatagatgagcgtcgtataatcgt
attcgagtttatcaaaacatattctacacgtcctgcagattcgataacttatttgatgaataggtttaaaaatatagatattta
tacccgctatgaaggaaagacattattacacgtagcatgtgaatataataatacacacgtaatagattatcttatacgta
tcaacggagatataaatgcgttaaccgacaataacaaacacgctacacaactcattatagataacaaagaaaattc
cccatataccattaattgtttactgtatatacttagatatattgtagataagaatgtgataagatcgttggtggatcaacttcc
atctctacctatcttcgatataaaatcatttgagaaattcatatcctactgtatacttttagatgacacattttacaatagaca
cgttaggaatcgcgattctaaaacgtatcgatacgcattttcaaaatacatgtcgtttgataaatacgatggtataataac
taaatgtcataaagaaacaatattgctcaaactatccactgttctagacactacactatatgcagttttaagatgccataa
ttcgaaaaagttaagaagatacctcaccgagttaaaaaaatataataacgataagtcctttaaaatatattctaatattat
gaatgagagataccttaatgtatattataaagatatgtacgtgtcaaaggtatatgataaactatttcctgttttcacagata
aaaattgtctactaacattactaccttcagaaattatatacgaaatattatacatgctgacaattaacgatctttataatata
tcgtatccacctaccaaagtatagttgtatttttctcatgcgatgtgtgtaaaaaaactgatattatataaatattttagtgcc
gtataataaagatgacgatgaaaatgatggtacatatatatttcgtatcattattgttattgctattccacagttacgccata
gacatcgaaaatgaaatcacagaattcttcaataaaatgagagatactctaccagctaaagactctaaatggttgaat
ccagcatgtatgttcggaggcacaatgaatgatatagccgctctaggagagccattcagcgcaaagtgtcctcctattg
aagacagtcttttatcgcacagatataaagactatgtggttaaatgggaaaggctagaaaaaaatagacggcgaca
ggtttctaataaacgtgttaaacatggtgatttatggatagccaactatacatctaaattcagtaaccgtaggtatttgtgc
accgtaactacaaagaatggtgactgtgttcagggtatagttagatctcatattagaaaacctccttcatgcattccaaa
aacatatgaactaggtactcatgataagtatggcatagacttatactgtggaattctttacgcaaaacattataataatat
aacttggtataaagataataaggaaattaatatcgacgacattaagtattcacaaacgggaaaggaattaattattcat
aatccagagttagaagatagcggaagatacgactgttacgttcattacgacgacgttagaatcaagaatgatatcgta
gtatcaagatgtaaaatacttacggttataccgtcacaagaccacaggtttaaactaatactagatccaaaaatcaac
gtaacgataggagaacctgccaatataacatgcactgctgtgtcaacgtcattattgattgacgatgtactgattgaatg
ggaaaatccatccggatggcttataggattcgattttgatgtatactctgttttaactagtagaggcggtattaccgaggc
gaccttgtactttgaaaatgttactgaagaatatataggtaatacatataaatgtcgtggacacaactattattttgaaaaa
acccttacaactacagtagtattggagtaaatatacaatgcatttttatatacattactgaataattattattattatttatatcg
tatttgtgctataacgcgactatctaggtatttgtatctcaccgatagagaacatataaatgtagactctattaaacagttgt
gtaaaatatcagatcctaatgcatgttatagatgtggatgtacggctttacatgagtacttttataattatagatcagtcaac
ggaaaatacaagtatagatacaacggttactatcaatattatttatctagcgattatgaaaattataatgaatattattatg
atgattatgatagaactggtatgaacagtgagagtgataatatatcaatcaaaacagaatatgaattctatgatgaaac
acaagatcaaagtacacaactagtaggttacgacattaaactcaaaaccaatgaggatgattttatggctatgataga
tcagtgggtgtccatgattatatagatgaatcaattaataaagtagtatatggaagagagtctcacgtaagatggcggg
atatatggcaagaacataatgatggcgtatacagtataggaaaggagtgcatagataatatatacgaagacaaccat
accgtagacgaattctacaagatagacagcgtatcagatgtagatgacgcggaacacatatctccgataactaatga
tgtatctacacaaacatgggaaaagaaatcagagttagatagatacatggaaatgtatcctcgtcatagatatagtaa
gcattctgtctttaagggattttctgacaaagttagaaaaaatgatttagacatgaatgtggtaaaagaattactttctaac
ggtgcatctctaacaattaaggatagcagtaataaggatccaataaccgtttattttcgaagaacgataatgaatttaga
aatgattgatgaacgaaagtatatagtacactcctatctaaaaaattataaaaatttcgattatccatttttcaggaagtta
gttttgactaataaacattgtctcaacaattattataatataagcgacagcaaatatggaacaccgctacatatattggcg
tctaataaaaaattaataactcctaattacatgaagttattagtgtataacggaaatgatataaacgcacgaggtgaag
atacacaaatgcgaactccattacacaaatatttgtgtaaatttgtatatcataatattgaatatggtatccgatactataat
gaaaagattatagacgcatttatagagttaggagccgatctaactattccaaatgacgatggaatgataccagtagttt
actgtatacactcaaatgccgaatatggttataacaatattactaacataaagataatacgtaaactacttaatcttagta
gacgtgcgtcacataatctatttagagatcgagtcatgcacgattatataagtaatacatatattgatcttgagtgtttagat
attattagatcgttggatggattcgatatcaatggttactttgaaggacgtacaccacttcattgcgctatacaacataactt
cactcagattgctaagtacttattagatcgaggagctgatatagtcgtacccaacacattgattatacatcagtacatac
agtaaatagcatagatatggaggaggatacaaatatttcaaataaagttataaggtacaacactgtcaataatatatg
ggaaacattacctaacttctggactggaactataaatccaggcgtggtctcgcataaagatgatatatatgttgtatgcg
acatcaaagatgaaaaaaatgttaaaacttgtatatttagatataacacgaatacgtataacggatgggaattggtcac
gacgacagaaagcagattatcagctctgcatactattctttataacaataccataatgatgttacattgttatgaatcgtat
atgttacaagatacatttaatgtgtacactcgcgaatggaatcatatgtgtcatcaacattcgaatagttatatcatgtaca
atatactacccatctactaaatataatagaataaaataaatgagtatgatcattttagataacgattgattttatcattaccg
cttcattcttatattctttgcttacggaacctatatttagaaacatctactaacgattttttatgcttgcattattaatggtatgtaat
atgattgattgtgtacgcaataccaatttgttaagtatgaatacggggtacaaacataaactgaagtttaacattatttattt
atgatatatatcgttattgtttggtctataccatggatatctttaaagaactaatcttaaaacacacggatgaaaatgttttga
tttctccagtttctattttatctactttatctattctaaatcatggagcagctggttctacagctgaacaactatcaaaatatata
gagaatatgaatgagaatacacccgatgacaataatgacatggacgtagatattccgtattgtgcgacactagctacc
gcaaataaaatatacggtagcgatagtatcgagttccacgcctccttcctacaaaaaataaaagacgattttcaaact
gtaaactttaataatgctaaccaaacaaaggaactaatcaacgaatgggttaagacaatgacaaatggtaaaattaa
ttccttattgactagtccgctatccattaatactcgtatgacagttgttagcgccgtccattttaaagcaatgtggaaatatcc
attttctaaacatcttacatatacagacaagttttatatttctaagaatatagttaccagtgttgatatgatggtgagcactga
gaataacttgcaatatgtacatattaatgaattattcggaggattctctattatcgatattccatacgagggaaactctagt
atggtaattatactaccggacgacatagaaggtatatataacatagaaaaaaatataacagatgaaaaatttaaaaa
atggtgtggtatgttatctactaaaagtatagacttgtatatgccaaagtttaaagtggaaatgacagaaccgtataatct
ggtaccgattttagaaaatttaggacttactaatatattcggatattatgcagattttagcaagatgtgtaatgaaactatca
ctgtagaaaaatttctacatacgacgtttatagatgttaatgaggagtatacagaagcatcggccgttacaggagtattt
atgactaacttttcgatggtatatcgtacgaaggtctacataaaccatccattcatgtacatgattaaagacaacacagg
acgtatactttttatagggaaatactgctatccgcaataaatataaacaaatagacttttatcacgtttatctatgtctaaat
attacaaatagtaatagtataaactaaagctgataatacttaaaaaaataataatatcatttacaattaatagtataaact
aaaaattaaacaaatcgttattataagtaatatcaaaatgatgatatacggattaatagcgtgtcttatattcgtgacttcat
ccatcgctagtccactttatattcccgttattccacccatttcggaagataaatcgttcaatagtgtagaggtattagtttcctt
gtttagagatgaccaaaaagactatacggtaacttctcagttcaataactacactatcgataccaaagactggactatc
ggcgtactatccacacctgatggtttggatataccattgactaatataacttattggtcacggtttactataggtcgtgcatt
gttcaaatcagagtctgaggatattttccaaaagaaaatgagtattctaggtgtttctatagaatgtaagaagtcgtcgac
attacttacttttttgaccgtgcgtaaaatgactcgagtatttaataaatttccagatatggcttattatcgaggagactgttta
aaagccgtttatgtaacaatgacttataaaaatactaaaactggagagactgattacacgtacctctctaatggggggt
tgcctgcatactatcgtaatggggtcgatggttgattattgattagtatattccttattctttttattcacacaaaaagaacattt
ttataaacatgaaaccactgtctaaatgtaattatgatcttgatttatagatgaagatcagcctttagaggattttaaccagt
atgtttaatatgaaaaaaataaacataacatattttgagattaagcgctattgtgcaagattatattagaatcaaattaatc
tttcatacgagaaaaataacgacatacgtcgtcaacaaattaaactttttatttattagttaactagcttatagaacttgctc
attgttatgtttctaaaacgggtacgacatataggacaattatccgacgcaccggtttctcttcgtgttttatgccatatattg
atgcatgttatgcaaaatatatgagtacacgaatccaataaaccaaagtatctatcgttttgagtaaacaacttcatagc
aaattccacattctttttctttacttactctatacacgtcctcgtatttatccagtattttgatgatatccaactcagaaatggttgt
tgtattattgggtgtattgggagtataggtattattagctatgtaccaatttaccaaccctcttaatattgattgaacaatcac
atcggttatccaatcaataaccacattaataactaaattgtagtgtatatatagaccatatatgtttctatttttttgacagtta
cgtatagtttcagtaagttttgattgttgtattcctgtatctctagataagttagtcatatagtcccttccggcgatacgttttttcc
aagcccgaaattgattagccaaatgtgtatttatttttgtgatattgatataatatgtaatgttattaatatttcggataatgcat
actgttagtcttatatcatttggttcatctatgtattgtaatattgttacatgatctatagatgatgtattgattttggcaggatcga
attccatatccgcgactaaacagtgaaaaaaatgtaaatactttttaaattttaaattagtaaaacttttttttattttttatgatt
ccaaaaatactgaatacaaagtcctaaattataaatatggagatcatactaccacaacttattattatgcatactcagcc
ggtgtaatagatagatatatataattctattacaccggcagacaattaccgatcggtatttgtcgttaccaacataccgtat
aatatgtaatatacaattccataacccattgacagttgttatacatcaaaattgcaattcttttgattacgatgttataagaat
gtagttaattgatgtatgatgttaatgtgtcctctttcctcttataacatcgtaatcaaaaacttttttataatatatacctaataa
tgtgtcttaatagttctcgtgattcgtcaaacaatcattcttataaaatataataaagcaacgtaaaacacataaaaataa
gcgtaactaataagacaatggatatttacgacgataaaggtctacagactattaaactgtttaataatgaatttgattgtat
aaggaatgacatcagagaattatttaaacatgtaactgattccgatagtatacaacttccgatggaagacaattctgat
attatagaaaatatcagaaaaatactatatagacgattaaaaaatgtagaatgtgttgacatcgatagtacaataacttt
tatgaaatacgatccaaatgatgataataagcgtacgtgttctaattgggtacccttaactaataactatatggaatattgt
ctagtaatatatttggaaacaccgatatgtggaggcaaaataaaattataccaccctacaggaaatataaagtcggat
aaggatattatgtttgcaaagactctagactttaaatcaaagaaagtgttaactggacgtaaaacaattgccgttctaga
catatccgtttcatataatagatcaatgactactattcactacaacgacgacgttgatatagatatacatactgataaaaa
tggaaaagagttatgttattgttatataacaatagatgatcattacttggttgatgtggaaactataggagttatagtcaata
gatctggaaaatgtctgttagtaaataaccatctaggtataggtatcgttaaagataaacgtataagcgatagttttgga
gatgtatgtatggatacaatatttgacttttctgaagcacgagagttattttcattaactaatgatgataacaggaatatagc
atgggacactgataaactagacgatgatacagatatatggactcccgtcacagaagatgattacaaatttctttctaga
ctagtattgtatgcaaaatctcaatcggatactgtattcgactattatgttcttactggtgatacggaaccacccactgtatt
cattttcaaggtaactagattttactttaatatgccgaaataaaaaatttttgtataatatctagaggtagaggtattgtttag
ataaatacaaataacatagatacatcgcatacttagcatttttataaatatacataagacatacactttatacattttttttgt
aaaaatactcataaaaaaatttataaaaattatggcacaaccatatcttgtataggtagtttagttcgtcgagtgaaccta
taaacagataatagacaacacgtaataataataatgcctactaatacaagcataataccgggagatgggatatatga
cgttgtagtgtttgggttttctgaacgttgatagtctactaatactacatgctgacatctaatgcctgtataaccatgagagc
atctacaatacataccgtcaatatctctagcgtggatacagtcaccgtgtaaacaatatccatctccctctggaccgcat
aatctgatagctggaatatctgttgtagcgtttgtaatttctggcgatgtcgtttcgatagcgttaccactatcggcgaatgat
ctgattatcatagcagcgaacaacaacatcagatatttcatcgacatttttgatggattttgtgtttatgctgtttctcagtgtgt
gtttatgacaagattgggaattttatattattaattcagtaatataaactaataatatattgttaattgtgtaaataatataaaa
ataacaatacaatattgaatgtgttgctgttaaaaatgatcataaacacggagtttattttatatgtctcgcataaacattac
taaaaaaatatattgttctgtttttctttcacatctttaattatgaaaaagtaaatcattatgagatggacgagattgtacgcat
cgttcgcgacagtatgtggtacatacctaacgtatttatggacgacggtaagaatgaaggtcacgtttctgtcaacaatg
tctgtcatatgtatttcacgttctttgatgtggatacatcgtctcatctgtttaagctagttattaaacactgcgatctgaataaa
cgaggtaactctccattacattgctatacgatgaatacacgatttaatccatctgtattaaagatattgttacaccacggc
atgcgtaactttgatagcaaggatgaaaaaggacaccactatcaatcgataacaagatctttgatatactaacggaca
ccattgatgactttagtaaatcatccgatctattgctgtgttatcttagatataaattcaatgggagcttaaactattacgttct
gtacaaaggatccgacgaggatgaactcacttctcttcattactactgtaaacacatatccacgttctacaaaagcaatt
attacaagttaagtcacactaagatgcgagccgagaagcgattcatctacgcgataatagattatggagcaaacatta
acgcggttacacacttaccttcaacagtataccaaacatagtcctcgtgtggtgtatgctcttttatctcgaggagccgat
acgaggatacgtaataatcttgattgtacacccatcatggaacgattgtgcaacaggtcatattctcataatgttactcaa
ttggcacgaacaaaaggaagaaggacaacatctactttatctattcataaaacataatcaaggatacactctcaatat
actacggtatctactagataggttcgacattcagaaagacgaatactataataccgcctttcaaaattgtaacaacaat
gttgcctcatacatcggatacgacatcaaccttccgactaaagacggtattcgacttggtgtttgaaaacagaaacatc
atatacaaggcggatgttgtgaatgacatcatccaccacagactgaaagtatctctacctatgattaaatcgttgttctac
aagatgtctctccctacgacgattactacgtaaagaagataatagcctactgcctattaagggacgagtcattcgcgg
aactacatagtaaattctgtttaaacgaggactataaaagtgtatttatgaaaaatatatcattcgataagatagattccat
catcgtgacataagtcgccttaaagagattcgaatctccgacaccgacctgtatacggtatcacagctatcttaaagcc
atacattcagacagtcacatttcatttcccatgtacgacgatctcatagaacagtgccatctatcgatggagcgtaaaag
taaactcgtcgacaaagcactcaataaattagagtctaccatcggtcaatctagactatcgtatttgcctccggaaattat
gcgcaatatcatctaaacagtatgttgtacgaaaagaaccattacaaatattatccatgatagaaagaaaatatctata
tgattggagaagtaggaaacaggaacaagacgacgattactacattattaaatcatgaagtccgtattatactcgtata
tattgtttctctcatgtataataataaacggaagagatatagcaccgcatgcaccatccgatggaaagtgtaaagacaa
cgaatacaaacgccataatttgtgtccgggaacatacgcttccagattatgcgatagcaagactaacacacaatgtac
gccgtgtggttcgggtaccttcacatctcgcaataatcatttacccgcttgtctaagttgtaacggaagacgcgaccgtgt
aacacgactcacaatagaatctgtgaatgctctcccggatattattgtcttctcaaaggatcatccggatgcaaggcatg
tgtttcccaaacaaaatgtggaataggatacggagtatccggagacgtcatctgttctccgtgtggtctcggaacatatt
ctcacaccgtctcttccgcagataaatgcgaacccgtacccagtaatacctttaactatatcgatgtggaaattaatctgt
atccagttaacgaccactaccggtctcagcgaatccatctcaacgtcggaactaactattactatgaatcataaagact
gtaatcccgtatttcgtgaggaatacttctccgtccttaataaggtagcaacttcaggtttctttacaggagaaaggtgtgc
actctgaatttcgagattaaatgcaataacaaaaatttttcctccaaacagttaacgaaagcaaagaatgatgacggt
atcatgccgcattcggagactgtctatctagcgtcgacatctatatactatatagtaataccaatactcaagactacgaa
actgatacaatctcttatcatgtgggtaatgttctcgatgtcgatagccatatgcccggtagttgcgatatacataaactga
tcactaattccaaacccacccgctttttatagtaagtttttcacccataaataataaatacaataattaatttctcgtaaaag
tagaaaatatattctaatttattgcacggtaaggaagtagaatcataaagaacagtactcaatcaatagcaatcatgaa
acaatatatcgtcctggcatgcatgtgcctgccagtcttcagcaatcatcctcatcctcctcctcgtgtacggaagaaga
aaacaaacatcatatgggaatcgatgttattatcaaagtcacaaagcaagaccaaacaccgaccaatgataagattt
gccaatccgtaacggaaattacagagtccgagtcagatccagatcccgaggtggaatcagaagatgattccacatc
agtcgaggatgtagatcctcctaccacttattactccatcatcggtggaggtctgagaatgaactttggattcaccaaat
gtcctcagattaaatccatctcagaatccgctgatggaaacacagtgaatgctagattgtccagcgtgtccccaggac
aaggtaaggactctcccgcgatcactcatgaagaagctctggctatgatcaaagactgtgaggtgtctatcgacatca
gatgtagcgaagaagagaaagacagcgacatcaagacccatccagtactcgggtctaacatctctcataagaaag
tgagttacgaagatatcatcggttcaacgatcgtcgatacaaaatgtgtcaagaatctagagtttagcgttcgtatcgga
gacatgtgcaaggaatcatctgaacttgaggtcaaggatggatttaagtatgtcgacggatcggcatctgaaggtgca
accgatgatacttcactcatcgattcaacaaaactcaaagcgtgtgtctgaatcgataactctattcatctgaaattggat
gagtagggttaatcgaacgattcaggcacaccacgaattaaaaaagtgtaccggacactatattccggtttgcaaaa
caaaaatgttcttaactacattcacaaaaagttacctctcgcgacttcttctttttctgtctcaatagtgtgatacgattatgac
actattcctattcctattcctatttcctttcagggtatcacaaaaatattaaacctctttctgatggtctcataaaaaaagtttta
caaaaatatttttattctctttctctctttgatggtctcataaaaaaagttttacaaaaatatttttattctctttctctctttgatggtc
tcataaaaaaagttttacaaaaatatttttattctctttctctctttgatggtctcataaaaaaagttttacaaaaatatttttattc
tctttctctctttgatggtctcataaaaaaagttttacaaaaatatttttattctctttctctctttgatggtctcataaaaaaagtttt
acaaaaatatttttattctctttctctctttgatggtctcataaaaaaagttttacaaaaatatttttattctctttctctctttgatggt
ctcataaaaaaagttttacaaaaatatttttattctctttctctctttgatggtctcataaaaaatattaaacctctttctgatggt
gtcactaaaatatttttattctcattctcattttctctttctctcttcaatggagtcataaaatatttttattctctttctctcttcgatggt
ctcacaaaaatattaaacctctttctgatggtgtcactaaaatatttttattctcattctcattttctctttctctcttcaatggagtc
ataaaatatttttattctctttctctcttcgatggtctcacaaaaatattaaacctctttctgatggagtcgtaaaaaagttttatc
tctttctctcttcgatggtctcacaaaaatattaaacctctttctgatggagtcgtaaaaaagttttatctctttctctcttcgatg
gtctcacaaaaatattaaacctctttctgatggagtcgtaaaaaagttttatctctttctctcttcgatggtctcacaaaaata
ttaaacctctttctgatggagtcgtaaaaaagttttatctctttctctcttcgatggtctcacaaaaatattaaacctctttctga
tggagtcgtaaaaaagttttatctctttctctcttcgatggtctcacaaaaatattaaacctctttctgatggagtcgtaaaaa
agttttatctctttctctcttcgatggtctcacaaaaatattaaacctctttctgatggagtcgtaaaaaagttttatctctttctct
cttcgatggtctcacaaaaatattaaacctctttctgatggagtcgtaaaaaagttttatctctttctctcttcgatggtctcac
aaaaatattaaacctctttctgatggagtcgtaaaaaagttttatctctttctctcttcgatggtctcacaaaaatattaaacc
tctttctgatggagtcgtaaaaaagttttatctctttctctcttcgatggtctcacaaaaatattaaacctctttctgatggagtc
gtaaaaaagttttatctctttctctcttcgatggtctcacaaaaatattaaacctctttctgatggagtcgtaaaaaagttttat
ctctttctctcttcgatggtctcacaaaaatattaaacctctttctgatggagtcgtaaaaaagttttatctctttctctcttcgat
ggtctcacaaaaatattaaacctctttctgatggagtcgtaaaaaagttttatctctttctctcttcgatggtctcacaaaaat
attaaacctctttctgatggagtcgtaaaaaagttttatctctttctctcttcgatggtctcacaaaaatattaaacctctttctg
atggagtcgtaaaaaagttttatctctttctctcttcgatggtctcacaaaaatattaaacctctttctgatggagtcgtaaaa
aagttttatctctttctctcttcgatggtctcacaaaaatattaaacctctttctgatggagtcgtaaaaaagttttatctctttct
ctcttcgatggtctcactaaaatattttttattctctttctgatgcatcaactatttcttaaacaataacgtccaacaacatatac
tcgtcgagcttatcaacatcccctatgcccatctaggttaccagacaattgtatatcataaaataatgtttataatttacacg
ttaaaatcatataataaaacgtagatcgtataatattttttggtatataaatgatctagtaaaatccatgtaggggatactg
ctcacattttttctttggtacaaaatttcacacaagtttttatacagacaaattcttgtccatatattttaaaacattgacttttgta
ctaagaaaaatatctagatcaactatctctttctctttctctcttcgatggtctcacaaaaatattaaacctctttctgatggag
tcgtaaaaaagttttatctctttctctcttcgatggtctcacaaaaatattaaacctctttctgatggagtcgtaaaaaagtttt
atctctttctctcttcgatggtctcacaaaaatattaaacctctttctgatggagtcgtaaaaaagttttatctctttctctcttcg
atggtctcacaaaaatattaaacctctttctgatggagtcgtaaaaaagttttatctctttctctcttcgatggtctcacaaaa
atattaaacctctttctgatggagtcgtaaaaaagttttatctctttctctcttcgatggtctcacaaaaatattaaacctctttc
tgatggagtcgtaaaaaagttttatctctttctccttcgatggtctcacaaaaatattaaacctctttctgatggagtcgtaaa
aaagttttatctctttctctcttcgatggtctcacaaaaatattaaacctctttctgatggagtcgtaaaaaagttttatctctttc
tctcttcgatggtctcacaaaaatattaaacctctttctgatggagtcgtaaaaaagttttatctctttctccttcgatggtctca
caaaaatattaaacctctttctgatggagtcgtaaaaaagttttatctctttctccttcgatggtctcacaaaaatattaaac
ctctttctgatggagtcgtaaaaaagttttatctctttctctcttcgatggtctcacaaaaatattaaacctctttctgatggagt
cgtaaaaaagttttatctctttctctcttcgatggtctcacaaaaatattaaacctctttctgatggtctctataaagcgatcg
atctttcttacactctagagtttcctacagtcatgggtcacacatttttttctagacactaaataaaatatttaaaatataatatt
aatgtactaaaacttatatattattaatttatctaactaaagttagtaaattatatatataattttataattaatttaattttactaat
tttatttagtgtctagaaaaaaa

[0078] To evaluate the removal of the bacterial vector sequences following sMVA reconstitution, DNA of sMVA-infected BHK cells upon serial virus passage of sMVA in BHK cells was evaluated by PCR using primers specific for the sopA and cat chloramphenicol resistance gene of the bacterial vector. This PCR analysis showed that residual vector sequences can be detected in sMVA DNA at 7 or 8 dpt/i, although they were undetectable in sMVA DNA following two additional virus passages of sMVA. These results in sum provide evidence that co-transfection of the three synthetic MVA fragments as circular plasmid molecules into FPV-infected BHK cells leads to the formation of sMVA with full-length, vector-free genomes that appear to have similar sequence composition as the published genome sequence of MVA strain Antoine²⁶.

### Example 2: Generation of Recombinant sMVA Expressing a Single Heterologous Gene Sequence

[0079] To evaluate the use of the three sMVA fragments to generate rsMVA, the three fragments were transferred into GS1783 E. coli cells⁴⁰, which are used to manipulate large BAC-cloned DNA molecules by En Passant mutagenesis^{39,40}. This highly-efficient method allows the introduction of point mutations or large or small sequence insertions or deletions into BAC cloned DNA molecules by a two-step mutagenesis procedure based on Red recombination without leaving behind any bacterial marker sequences^{39,40}. As an initial test of the sMVA platform to generate rsMVA expressing heterologous gene sequences, the generation of rsMVA expressing a single fluorescence marker was evaluated. As previously described for the insertion of antigen sequences into MVABAC-TK^{18,24}, En passant mutagenesis was used to insert an expression cassette composed of a red fluorescent protein (RFP) marker with upstream mH5 promoter and downstream TTTTTAT vaccinia virus transcription termination signal into the IGR69/70 (also known as G1L/I8R) insertion site within sMVA fragment F2 (FIG. 3), resulting in F2-RFP. Sequence integrity of the manipulated sMVA fragments was determined by restriction fragment length polymorphism (RFLP) analysis as well as PCR and Sanger sequencing analysis of the gene insertion sites. The modified sMVA fragment F2 with inserted RFP marker as well as unmodified sMVA fragments F1 and F3 were isolated from E. coli and co-transfected into BHK cells to evaluate the reconstitution of rsMVA in the presence of FPV as a helper virus using the procedure as illustrated in FIG. 5. As shown in FIG. 8, immunofluorescence imaging revealed the formation and progression of red fluorescent viral plaques at 3-6 dpt/i in BHK cell monolayers transfected with the F1/F2-RFP/F3 plasmid combination, while at 7 dpt/i RFP expression was visible in the entire BHK cell monolayer. In contrast, no RFP expression was visible in mock-transfected/infected BHK cell monolayers. These results in sum demonstrate that the sMVA platform can be used to rapidly generate rsMVA expressing a single heterologous gene sequence.

### Example 3: Generation of Recombinant sMVA Expressing Two Heterologous Gene Sequences

[0080] To evaluate the sMVA platform for the generation of rsMVA with multiple heterologous gene sequences inserted into different genome positions, the construction of rsMVA expressing two fluorescence markers was evaluated. Using En passant mutagenesis of GS1783 cells, gene expression cassettes composed of a P11 promoter, an RFP marker or blue fluorescent protein (BFP) marker, and TTTTTAT transcription termination signal were separately inserted into the IGR69/70 of sMVA F2 and the Del3 site of sMVA F3. The modified sMVA F2 with inserted RFP marker (F2-RFP) and the modified sMVA F3 with inserted BFP marker (F3-BFP) were isolated from GS1783 E. coli cells and co-transfected together with unmodified sMVA F1 into BHK cells to evaluate the reconstitution of rsMVA with RFP and BFP marker in the presence of a helper virus using the procedure shown in FIG. 5. As shown in FIG. 9, immunofluorescence imaging demonstrated the formation of double fluorescent (red and blue) viral plaques at 3-6 dpt/i in the BHK cell monolayers co-transfected with the F1/F2-RFP/F3-BFP plasmid combination, and at 7 dpt/i most or all of the BHK cells appeared to show RFP and BFP dual fluorescent protein expression. These results provide evidence that the sMVA platform can be used to rapidly generate rsMVA expressing two heterologous gene sequences inserted into different insertion sites.

### Example 4: Generation of Recombinant sMVA Expressing Three Heterologous Gene Sequences

[0081] To further evaluate the sMVA platform for the generation of rsMVA with multiple inserted heterologous gene sequences, the generation of rsMVA expressing three fluorescence markers was investigated. Using En passant mutagenesis in E. coli, a green fluorescent protein (GFP) marker together with upstream P11 promoter and downstream transcription termination signal was inserted into the IGR44/45 of MVA F1. The resulting modified sMVA fragment F1 with inserted GFP marker (F1-GFP) was then tested in different combinations with the fluorescence tagged forms of F2 and F3 (F2-RFP and F3-BFP) as well as unmodified sMVA fragments of F1, F2, and F3 to evaluate the single, double, or triple fluorescent sMVA expression vectors using the procedure shown in FIG. 5. The fragment combinations used for co-transfection included F1-GFP/F2-RFP/F3-BFP, F1-GFP/F2-RFP/F3, F1-GFP/F2/F3-BFP, F1/F2-RFP/F3-BFP, F1-GFP/F2/F3, F1/F2-RFP/F3, and F1/F2/F3-BFP. Co-transfection of the three non-modified sMVA fragments (F1/F2/F3) into FPV-infected BHK cells was evaluated as a negative control. With the exception of the negative control, fluorescent gene expression was observed by immunofluorescence imaging at 3-6 dpt/i in BHK cell monolayers transfected with any of the different fragment combinations. At 7 to 8 dpt/i, fluorescence marker expression was observed in most cells of the BHK monolayers, indicating the reconstitution of fluorescent recombinant sMVA expression vectors. The recombinant sMVA expression vectors were prepared by freeze/thaw technique, titrated on BHK cells, and used to infect BHK cell monolayers at low MOI. At 16-24 hpi, the infected BHK cell monolayers were evaluated by IF imaging to confirm the formation and reconstitution of sMVA expressing different fluorescent marker sequences. This analysis revealed the formation of viral foci that showed triple fluorescence expression in BHK cell monolayers infected with F1-GFP/F2-RFP/F3-BFP-derived sMVA; double fluorescent expression in BHK cell monolayers infected with F1-GFP/F2-RFP/F3, F1-GFP/F2/F3-BFP, or F1/F2-RFP/F3-BFP-derived sMVA; and single fluorescence expression in BHK cell monolayers infected with F1-GFP/F2/F3, F1/F2-RFP/F3, or F1/F2/F3-BFP-derived sMVA. These results in sum indicate that the three sMVA fragments can be manipulated in E. coli and used as circular DNA molecules to reconstitute single, double, or triple recombinant sMVA expression vectors, highlighting the potential of the three sMVA fragments to generate recombinant vaccine vectors.

### Example 5: Construction and Evaluation of an Example of an Infectious Disease Antigen Modified MVA

[0082] To demonstrate utility of the sMVA platform to generate a multi-antigenic vaccine vector for infectious disease, the construction of rsMVA expressing the five-member HCMV envelope pentamer complex (PC) composed of gH, gL, UL128, UL130, and UL131A is evaluated. Antigen expression cassettes composed of 2A-linked gH/gL and UL128/UL130/UL131A subunits are separately inserted into the IGR69/70 located in sMVA F2 and the Del3 site located sMVA F3 using En Passant mutagenesis in E. coli. The modified sMVA fragments of F2 and F3 are transfected together with the unmodified sMVA fragment of F1 into FPV-infected BHK cells to reconstitute sMVA expressing all five PC subunits (rsMVA-PC). As a control, rsMVA expressing only the gH/gL or UL128/130/131A subunits is generated as well as sMVA without any inserted antigen sequences. Expression of the antigen sequences is confirmed by Western Blot, and the formation of multi-protein complexes by the PC subunits expressed from rsMVA-PC is verified by flow cytometry (FC) using neutralizing antibodies (NAb) that target conformational epitopes formed by two or more subunits of the PC. To investigate the immunogenicity of the rsMVA-PC vector to stimulate NAb, Balb/c mice are immunized three times with rsMVA-PC or the control vectors by intraperitoneal route in four-week intervals. At various time points post immunization, HCMV-specific NAb responses are measured on MRC-5 fibroblasts (FB) and ARPE-19 epithelial cells (EC). This analysis can reveal potent stimulation of FB and EC-specific NAb responses in mice immunized with rsMVA-PC, while no or only minimal responses are measured in mice immunized with the control vectors. These results can demonstrate that the sMVA vaccine platform can be used to generate a multi-antigenic MVA vaccine vector that expresses all five PC subunits which assemble with each other to form NAb epitopes and stimulate potent NAb responses in mice.

### Example 6: Construction and Evaluation of 2019-nCoV Expressed from sMVA

[0083] An example for the utility of the sMVA platform to generate vaccines for the Coronavirus strain 2019-nCoV (Wuhan), which has recently emerged as a new, highly contagious and pathogenic Coronavirus is illustrated. Because the S (Spike) protein of Coronaviruses is involved in receptor recognition, as well as virus attachment and entry, and a dominant target of protective humoral and cellular immunity it represents a potential target for the development of Coronavirus (CoV) vaccines and therapeutics. cDNAs encoding the full-length S protein (1273 amino acids), the immunogenic S1 domain of the S protein of the 2019-nCoV strain, or the receptor binding domain (RBD) of the S1 domain are separately inserted into the MVA Del3 site of sMVA fragment F3. The resulting modified fragment of sMVA F3 is then co-transfected with the unmodified versions of sMVA fragment F1 and F2 into BHK cells to initiate the reconstitution of sMVA expressing the new coronavirus S protein (sMVA-2019-nCoV-S), the S1 domain (sMVA-2019-nCoV-S1), or the RBD domain (sMVA-2019-nCoV-RBD) using the procedure as illustrated in FIG. 5. The expression of the S protein, S1 domain, or the RBD domain from the sMVA recombinants is confirmed by Immunoblot and flow cytometry analysis. Convalescent serum from infected humans, mice or rabbits is used as a detection reagent for the immunoblots. In some cases, tags such as HA are covalently attached at the carboxyl terminus, and antibodies against them are used as detection reagents for either immunoblots or flow cytometry. Similarly, additional immunogenic proteins, e.g. N or M antigens from 2019-nCoV are inserted into unique gene insertion regions of sMVA to develop multi-antigen vaccines. For example, one or more of these 2019-nCoV antigens are inserted in one or more insertion sites such as Del3 site of sMVA fragment F3 and IGR69/70 of sMVA fragment F2.

[0084] To test the immunogenicity and protective efficacy of the sMVA constructs two animal models can be used: (1) Given the more severe symptoms observed in elderly individuals, 12 months old Balb/c mice are immunized two times by subcutaneous and intramuscular routes in four-week intervals with 1×10⁷-1×10⁸ of sMVA plaque forming units (Pfu); and (2) Considering the potential involvement of human angiotensin-converting enzyme-2 (hACE-2) in nCoV entry into lung cells, transgenic mice expressing the human hACE2 receptor are used to test vaccine efficacy.

[0085] To test the immunogenicity and protective efficacy of the sMVA constructs, Balb/c mice transgenic for angiotensin converting enzyme 2 (ACE2) are immunized two times by subcutaneous and intramuscular routes in four-week intervals with 1×10⁷-1×10⁸ of sMVA plaque forming units (Pfu). Neutralizing antibody responses and T cell responses specific for the 2019-nCoV-S protein and derivatives are measured as previously described at 1 week after each immunization. At 45 days post booster immunization, the mice are infected with 7×10⁴ 50% tissue culture infective doses (TICD50) of 2019-nCoV that is homologous to the vaccine antigens, and heterologous strains (SARS-CoV and MERS-CoV) and 4 days post challenge, the animals are sacrificed, and their lungs are harvested for measurement of viral loads and for histopathological analysis. Large virus loads, on average, >11,000 to >20,000 2019-nCoV genome equivalents/ng of total RNA, are found in both mock-immunized and nonrecombinant MVA-immunized control groups and in animals challenged with heterologous CoV strains. In sharp contrast, the lung tissue of protein (sMVA-nCoV-S) or the S1 domain (sMVA-nCoV-S1) subjects contains significantly lower levels of 2019-nCoV RNA (viral load), indicating efficient inhibition of 2019-nCoV replication by the vaccine-induced immune responses. All placebo control animals (MVA-GFP) succumbed 4 to 8 days postinfection, while MVA-S, MVA-N and MVA-N/S show no or minimal signs of disease, including minimal weight loss. MVA-N/S immunized mice are completely protected.

[0086] Histopathology is focused on lung damage that is substantially reduced in the 2019-nCoV subunit antigen immunized animals. The potential for antibody-enhancement of disease is also evaluated and found to be absent in these subunit vaccine models. NAb responses to S protein antigens and their S1 and RBD derivatives are assessed using a pseudotyping strategy for nCoV that is robust for recognition by antigen-specific NAb, but the use of pathogenic strains of CoV is avoided. The serum from animals immunized with S proteins and derivatives develops high titer and neutralizing antibodies against homologous 2019-nCoV strains and not heterologous CoV strains such as the etiologic agents for MERS and SARS. IC90 neutralizing titers are calculated for each mouse serum sample. Based on the success of the vaccine studies in transgenic ACE2 Balb/c mouse strains, progressively larger animal species are investigated, i.e. rabbits, ferrets, and rhesus macaques which have susceptibility to 2019-nCoV challenge and are known to respond to MVA-based vaccines.

### Example 7: Construction and Evaluation of an Example of a Cancer Antigen Modified sMVA

[0087] This example demonstrates insertion of a mouse p53 gene that has been previously used in studies with MVA backbones obtained from the ATCC or the NIAID⁴⁶. The mouse p53 cDNA is inserted into the deletion (DEL3) locus using en passant such that no additional nucleotide additions or subtractions are made in the exact insertion site of the locus. The insertion is verified by sequence analysis to be accurately made and all pertinent regions are intact and 100% sequence verifiable. Subsequent to the modification of plasmid F3, all three plasmids are combined into a single aliquot and using the identical method as described in Example 2, a modified version of sMVA is generated, and live virus is obtained two days after the transfection/infection with FPV. The live virus is concentrated and expanded on BHK cells and stocks are made, and are sequence verified using the Sanger method to establish that the virus has the correct sequence of the p53 gene insertion in the DEL3 locus. Furthermore, virus stocks are made and are frozen and put into long-term storage, while at the same time, working stocks are prepared using the published methods to expand modified sMVA stocks to titers in ≥1×10⁹ pfu/mL. The verification of the expanded stock is conducted using a combination of qPCR, Sanger sequencing, infectious titer, and Western blot analysis. All four of these procedures are performed and the appropriate result is obtained to confirm that a nucleotide sequence has the appropriate size, the infectious titer is within the range of ≥1×10⁹ pfu/mL, and Western blot analysis confirms a protein band at approximately 53 Kd. One skilled in the art can apply this approach using human versions of the p53 gene as a vaccine to protect humans from cancer progression.

Murine (mu) p53-sMVA

[0088] Female 6-8-week old BALB/C mice are obtained from the Jackson Laboratory (Bar Harbor, Me.) and maintained in a specific pathogen-free environment. All studies are approved by the Research Animal Care Committee of City of Hope National Medical Center and performed under the American Association for the Accreditation of Laboratory Animal Care guidelines. Meth A sarcoma cells (Meth A) are a kind gift of Dr. LJ Old, Memorial Sloan-Kettering Cancer Center (New York, N.Y.). Meth A is passaged as an ascitic tumor. Anti-CTLA-4 (9H10) is a gift of Dr. James Allison, MD Anderson Cancer Center (Houston, Tex.). Antibodies are produced using the CELLine device (BD Biosciences, Mountain View, Calif.). IgG antibodies are purified by absorption over protein G-sepharose (Amersham Biosciences, Uppsala, Sweden) followed by elution with 0.1 M glycine-HCL (pH 2.7). The product is dialyzed against phosphate-buffered normal saline and concentrated using a Sentry Plus centrifugal filter device (Millipore, Bedford, Mass.). Control Syrian hamster IgG is obtained from Jackson ImmunoResearch (West Grove, Pa.). The rsMVA titer is determined by immunostaining infected cultures using the VECTASTAIN Elite ABC Kit (Vector Laboratories, Burlingame, Calif.). Antigen-specific detection of the mouse p53 protein expressed from sMVA uses the anti-p53 antibody, pab122, followed by incubation with a peroxidase-labeled goat anti-mouse secondary antibody provided in the kit. A control sMVA expressing CMV-pp65 is also constructed using the same technique as is used in constructing murine sMVAp53.

### In Vivo Tumor Challenge Experiments

[0089] Six-week-old female BALB/C mice are injected by subcutaneous route in the left flank with 5×10⁵ METH A cells. On day three, the mice are treated with 5×10⁷ pfu of sMVAp53 by intraperitoneal injection. Negative control mice are injected with 5×10⁷ pfu of sMVApp65 or phosphate buffered saline. An additional positive control utilizes the identical murine MVAp53 described in the original report. The subcutaneous tumors are evaluated by IVIS imaging methods weekly using a luciferase technique or by calipers if no luciferase gene is inserted into the METH A sarcoma cells. An additional approach is to inject BALB/C mice of the same age as the sMVA infections in the left flank with 1×10⁶ METH A cells. This tumor is shown to produce a rapidly lethal tumor in the majority of mice despite CTLA-4 (9H10) antibody treatment. On day seven post tumor inoculation, mice are injected intraperitoneally with 5×10⁷ pfu of sMVAp53. Controls are the same as described above. Anti-CTLA-4 (9H10) antibody or control hamster antibody are injected intraperitoneally on day six, nine, and twelve post tumor injection at doses of 100, 50, and 50 micrograms, respectively.

### Example 8: Construction and In Vitro and In Vivo Characterization of sMVA

[0090] The three sMVA fragments designed as shown in FIG. 1, when co-transfected as circular DNA plasmids into helper virus infected cells, can resolve into linear minichromosomes, recombine with each other via the shared homologous sequences, and are ultimately packaged as full-length MVA genomes. All three sMVA fragments were cloned in E. coli as bacterial artificial chromosome (BAC) clones.

[0091] Using a previously employed procedure to rescue MVA from a BAC^{16,24,25}, sMVA virus was reconstituted with Fowl pox (FPV) as a helper virus upon co-transfection of the three DNA plasmids into BHK cells (FIG. 2), which are non-permissive for FPV. Two different FPV strains (HP1.441 and TROVAC) were used to promote sMVA virus reconstitution (FIG. 12A). Ultra-purified sMVA virus was produced following virus propagation in CEF, which are commonly used for MVA vaccine production. The virus titers achieved with reconstituted sMVA virus were similar to virus titers achieved with wild-type MVA (wtMVA) (Table 1 below).

| Vector | Titer* |
|---|---|
| sMVA hp | 6.8 × 10⁹ PFU/ml |
| sMVA tv1 | 4.1 × 10⁹ PFU/ml |
| sMVA tv2 | 2.3 × 10⁹ PFU/ml |
| wtMVA | 4.1 × 10⁹ PFU/ml |

*Stocks were produced on CEF following infection (MOI 0.02) of 30 × 15 cm dishes

[0092] To characterize the viral DNA of sMVA, DNA extracts from sMVA and wtMVA-infected CEF were compared for several MVA genome positions by PCR. Similar PCR results were obtained with sMVA and wtMVA for all evaluated genome positions (FIG. 11A), including the F1/F2 and F2/F3 recombination sites, indicating efficient recombination of the three sMVA fragments. Additional PCR analysis indicated the absence of any BAC vector sequences in sMVA viral DNA (FIG. 11A), suggesting spontaneous and efficient removal of the bacterial vector elements upon sMVA virus reconstitution. Comparison of viral DNA from ultra-purified sMVA and wtMVA virus by restriction enzyme digestion revealed similar genome pattern between sMVA and wtMVA (FIG. 11B). Sequencing analysis of the sMVA viral DNA confirmed the MVA genome sequence at several positions, including the F1/F2 and F2/F3 recombination sites. Furthermore, whole genome sequencing of one of the sMVA virus isolates reconstituted with FPV TROVAC confirmed the assembly of the reference MVA genome sequence and absence of vector-specific sequences in viral DNA originating from the reconstituted sMVA virus.

[0093] To characterize the replication properties of sMVA, growth kinetics of sMVA and wtMVA were compared on BHK and CEF cells, two cell types known to support productive MVA replication⁴. This analysis revealed similar growth kinetics of sMVA and wtMVA on both BHK and CEF cells (FIG. 12B). In addition, similar areas of viral foci were determined in BHK and CEF cell monolayers infected with sMVA or wtMVA (FIG. 12C), suggesting similar capacity of sMVA and wtMVA to spread in MVA permissive cells. Compared to the productive replication of sMVA and wtMVA in BHK and CEF cells″, only limited virus production was observed with sMVA or wtMVA following infection of various human cell lines (FIG. 12D). These results are consistent with the severely restricted replication properties of MVA and show that the sMVA virus can efficiently propagate in BHK and CEF cells, while it is unable to efficiently propagate in human cells.

[0094] To characterize sMVA in vivo, the immunogenicity of sMVA and wtMVA was compared in C57BL/6 mice following two immunizations at high or low dose. MVA-specific binding antibodies stimulated by sMVA and wtMVA after the first and second immunization were comparable (FIGS. 13A, 14A). While the antibody levels in the high dose vaccine groups exceeded those of the low dose vaccine groups after the first immunization, similar antibody levels in the high and low dose vaccine groups were observed after the second immunization. In addition, no significant differences were detected in the levels of MVA-specific NAb responses induced by sMVA and wtMVA after the second immunization (FIGS. 13B, 14B). MVA-specific T cell responses determined after the booster immunization by ex vivo antigen stimulation using immunodominant peptides⁴⁷ revealed similar MVA-specific T cell levels in mice receiving sMVA or wtMVA (FIGS. 13C-13D and 14C-14D). These results indicate that the sMVA virus has a similar capacity to wtMVA in inducing MVA-specific humoral and cellular immunity in mice.

### REFERENCES

[0095] The references, patents and published patent applications listed below, and all references cited in the specification above are hereby incorporated by reference in their entirety, as if fully set forth herein.
[0096] 1 Volz, A. & Sutter, G. Modified Vaccinia Virus Ankara: History, Value in Basic Research, and Current Perspectives for Vaccine Development. Adv. Virus Res. 97, 187-243, doi:10.1016/bs.aivir.2016.07.001 (2017).
[0097] 2 Meisinger-Henschel, C. et al. Genomic sequence of chorioallantois vaccinia virus Ankara, the ancestor of modified vaccinia virus Ankara. The Journal of general virology 88, 3249-3259, doi:10.1099/vir.0.83156-0 (2007).
[0098] 3 Meyer, H., Sutter, G. & Mayr, A. Mapping of deletions in the genome of the highly attenuated vaccinia virus MVA and their influence on virulence. The Journal of general virology 72 (Pt 5), 1031-1038 (1991).
[0099] 4 Carroll, M. W. & Moss, B. Host range and cytopathogenicity of the highly attenuated MVA strain of vaccinia virus: propagation and generation of recombinant viruses in a nonhuman mammalian cell line. Virology 238, 198-211, doi:10.1006/viro.1997.8845 (1997).
[0100] 5 Sutter, G. & Moss, B. Nonreplicating vaccinia vector efficiently expresses recombinant genes. Proc. Natl. Acad. Sci. U.S.A 89, 10847-10851 (1992).
[0101] 6 Earl, P. L. et al. Immunogenicity of a highly attenuated MVA smallpox vaccine and protection against monkeypox. Nature 428, 182-185, doi:10.1038/nature02331 (2004).
[0102] 7 Gilbert, S. C. Clinical development of Modified Vaccinia virus Ankara vaccines. Vaccine 31, 4241-4246, doi:10.1016/j.vaccine.2013.03.020 (2013).
[0103] 8 Mayr, A., Stickl, H., Muller, H. K., Danner, K. & Singer, H. [The smallpox vaccination strain MVA: marker, genetic structure, experience gained with the parenteral vaccination and behavior in organisms with a debilitated defence mechanism (author's transl)]. Zentralbl Bakteriol B 167, 375-390 (1978).
[0104] 9 Wilck, M. B. et al. Safety and immunogenicity of modified vaccinia Ankara (ACAM3000): effect of dose and route of administration. J. Infect. Dis. 201, 1361-1370, doi:10.1086/651561 (2010).
[0105] 10 Vollmer, J. et al. Safety and immunogenicity of IMVAMUNE, a promising candidate as a third generation smallpox vaccine. Vaccine 24, 2065-2070, doi:10.1016/j.vaccine.2005.11.022 (2006).
[0106] 11 Greenberg, R. N. et al. A Multicenter, Open-Label, Controlled Phase II Study to Evaluate Safety and Immunogenicity of MVA Smallpox Vaccine (IMVAMUNE) in 18-40 Year Old Subjects with Diagnosed Atopic Dermatitis. PloS one 10, e0138348, doi:10.1371/journal.pone.0138348 (2015).
[0107] 12 Draper, S. J., Cottingham, M. G. & Gilbert, S. C. Utilizing poxviral vectored vaccines for antibody induction-progress and prospects. Vaccine 31, 4223-4230, doi:10.1016/j.vaccine.2013.05.091 (2013).
[0108] 13 Cottingham, M. G. & Carroll, M. W. Recombinant MVA vaccines: dispelling the myths. Vaccine 31, 4247-4251, doi:10.1016/j.vaccine.2013.03.021 (2013).
[0109] 14 Chung, V. et al. Evaluation of safety and efficacy of p53MVA vaccine combined with pembrolizumab in patients with advanced solid cancers. Clinical & translational oncology: official publication of the Federation of Spanish Oncology Societies and of the National Cancer Institute of Mexico 21, 363-372, doi:10.1007/s12094-018-1932-2 (2019).
[0110] 15 Ishizaki, H. et al. Modified vaccinia Ankara expressing survivin combined with gemcitabine generates specific antitumor effects in a murine pancreatic carcinoma model. Cancer Immunol. Immunother. 60, 99-109, doi:10.1007/s00262-010-0923-0 (2011).
[0111] 16 Wussow, F. et al. Human cytomegalovirus vaccine based on the envelope gH/gL pentamer complex. PLoS Pathog 10, e1004524, doi:10.1371/journal.ppat.1004524 (2014).
[0112] 17 La Rosa, C. et al. MVA vaccine encoding CMV antigens safely induces durable expansion of CMV-specific T cells in healthy adults. Blood 129, 114-125, doi:10.1182/blood-2016-07-729756 (2017).
[0113] 18 Chiuppesi, F. et al. Multiantigenic Modified Vaccinia Virus Ankara Vaccine Vectors To Elicit Potent Humoral and Cellular Immune Reponses against Human Cytomegalovirus in Mice. Journal of virology 92, doi:10.1128/JVI.01012-18 (2018).
[0114] 19 Diamond, D. J. et al. A fifty-year odyssey: prospects for a cytomegalovirus vaccine in transplant and congenital infection. Expert review of vaccines 17, 889-911, doi:10.1080/14760584.2018.1526085 (2018).
[0115] 20 McFadden, G. Poxvirus tropism. Nature reviews. Microbiology 3, 201-213, doi:10.1038/nrmicro1099 (2005).
[0116] 21 Wyatt, L. S., Earl, P. L. & Moss, B. Generation of Recombinant Vaccinia Viruses. Current protocols in protein science 89, 5 13 11-15 13 18, doi:10.1002/cpps.33 (2017).
[0117] 22 Wang, Z. et al. Modified H5 promoter improves stability of insert genes while maintaining immunogenicity during extended passage of genetically engineered MVA vaccines. Vaccine 28, 1547-1557, doi:10.1016/j.vaccine.2009.11.056 (2010).
[0118] 23 Cottingham, M. G. et al. Recombination-mediated genetic engineering of a bacterial artificial chromosome clone of modified vaccinia virus Ankara (MVA). PloS one 3, e1638, doi:10.1371/journal.pone.0001638 (2008).
[0119] 24 Wussow, F. et al. Exploiting 2A peptides to elicit potent neutralizing antibodies by a multi-subunit herpesvirus glycoprotein complex. J. Virol. Methods 251, 30-37, doi:10.1016/j.jviromet.2017.10.006 (2018).
[0120] 25 Wussow, F. et al. A vaccine based on the rhesus cytomegalovirus UL128 complex induces broadly neutralizing antibodies in rhesus macaques. Journal of virology 87, 1322-1332, doi:10.1128/JVI.01669-12 (2013).
[0121] 26 Antoine, G., Scheiflinger, F., Dorner, F. & Falkner, F. G. The complete genomic sequence of the modified vaccinia Ankara strain: comparison with other orthopoxviruses. Virology 244, 365-396, doi:10.1006/viro.1998.9123 (1998).
[0122] 27 Moss, B. Poxvirus DNA replication. Cold Spring Harbor perspectives in biology 5, doi:10.1101/cshperspect.a010199 (2013).
[0123] 28 Geshelin, P. & Berns, K. I. Characterization and localization of the naturally occurring cross-links in vaccinia virus DNA. Journal of molecular biology 88, 785-796, doi:10.1016/0022-2836(74)90399-4 (1974).
[0124] 29 Baroudy, B. M., Venkatesan, S. & Moss, B. Incompletely base-paired flip-flop terminal loops link the two DNA strands of the vaccinia virus genome into one uninterrupted polynucleotide chain. Cell 28, 315-324, doi:10.1016/0092-8674(82)90349-x (1982).
[0125] 30 Baroudy, B. M., Venkatesan, S. & Moss, B. Structure and replication of vaccinia virus telomeres. Cold Spring Harbor symposia on quantitative biology 47 Pt 2, 723-729, doi:10.1101/sqb.1983.047.01.083 (1983).
[0126] 31 Merchlinsky, M., Garon, C. F. & Moss, B. Molecular cloning and sequence of the concatemer junction from vaccinia virus replicative DNA. Viral nuclease cleavage sites in cruciform structures. Journal of molecular biology 199, 399-413, doi:10.1016/0022-2836(88)90613-4 (1988).
[0127] 32 Moyer, R. W. & Graves, R. L. The mechanism of cytoplasmic orthopoxvirus DNA replication. Cell 27, 391-401, doi:10.1016/0092-8674(81)90422-0 (1981).
[0128] 33 DeLange, A. M. & McFadden, G. Efficient resolution of replicated poxvirus telomeres to native hairpin structures requires two inverted symmetrical copies of a core target DNA sequence. Journal of virology 61, 1957-1963 (1987).
[0129] 34 Merchlinsky, M. Mutational analysis of the resolution sequence of vaccinia virus DNA: essential sequence consists of two separate AT-rich regions highly conserved among poxviruses. Journal of virology 64, 5029-5035 (1990).
[0130] 35 Garcia, A. D. & Moss, B. Repression of vaccinia virus Holliday junction resolvase inhibits processing of viral DNA into unit-length genomes. Journal of virology 75, 6460-6471, doi:10.1128/JVI.75.14.6460-6471.2001 (2001).
[0131] 36 Merchlinsky, M. & Moss, B. Resolution of vaccinia virus DNA concatemer junctions requires late-gene expression. Journal of virology 63, 1595-1603 (1989).
[0132] 37 DeLange, A. M., Reddy, M., Scraba, D., Upton, C. & McFadden, G. Replication and resolution of cloned poxvirus telomeres in vivo generates linear minichromosomes with intact viral hairpin termini. Journal of virology 59, 249-259 (1986).
[0133] 38 DeLange, A. M. & McFadden, G. Sequence-nonspecific replication of transfected plasmid DNA in poxvirus-infected cells. Proceedings of the National Academy of Sciences of the United States of America 83, 614-618, doi:10.1073/pnas.83.3.614 (1986).
[0134] 39 Tischer, B. K., von Einem, J., Kaufer, B. & Osterrieder, N. Two-step red-mediated recombination for versatile high-efficiency markerless DNA manipulation in Escherichia coli. BioTechniques 40, 191-197 (2006).
[0135] 40 Tischer, B. K., Smith, G. A. & Osterrieder, N. En passant mutagenesis: a two step markerless red recombination system. Methods in molecular biology 634, 421-430, doi:10.1007/978-1-60761-652-8_30 (2010).
[0136] 41 Birnboim, H. C. & Doly, J. A rapid alkaline extraction procedure for screening recombinant plasmid DNA. Nucleic acids research 7, 1513-1523, doi:10.1093/nar/7.6.1513 (1979).
[0137] 42 Schmelz, M. et al. Assembly of vaccinia virus: the second wrapping cisterna is derived from the trans Golgi network. Journal of virology 68, 130-147 (1994).
[0138] 43 Gilbert, S. C. Clinical development of Modified Vaccinia virus Ankara vaccines. Vaccine 31, 4241-4246 (2013).
[0139] 44 Scheiflinger, F., Dorner, F. & Falkner, F. G. Construction of chimeric vaccinia viruses by molecular cloning and packaging. Proc. Natl. Acad. Sci. U.S.A 89, 9977-9981, doi:10.1073/pnas.89.21.9977 (1992).
[0140] 45 Wyatt, L. S. et al. Elucidating and minimizing the loss by recombinant vaccinia virus of human immunodeficiency virus gene expression resulting from spontaneous mutations and positive selection. Journal of virology 83, 7176-7184, doi:10.1128/JVI.00687-09 (2009).
[0141] 46 Espenschied J, Lamont J, Longmate J, Pendas S, Wang Z, Diamond DJ, and Ellenhorn JD. CTLA-4 blockade enhances the therapeutic effect of an attenuated poxvirus vaccine targeting p53 in an established murine tumor model. J Immunol 170(6):3401-3407, 2003, PMID: 12626601.
[0142] 47. Taylor, J., Weinberg, R., Kawaoka, Y., Webster, R. G. & Paoletti, E. Protective immunity against avian influenza induced by a fowlpox virus recombinant. Vaccine 6, 504-508 (1988).
[0143] 48. Mayr, A. & Malicki, K. [Attenuation of virulent fowl pox virus in tissue culture and characteristics of the attenuated virus]. Zentralbl. Veterinarmed. B 13, 1-13 (1966).

1. A method of producing a poxvirus vector or a recombinant poxvirus vector, comprising:
transfecting one or more DNA fragments into a host cell, wherein the one or more DNA fragments comprise the entire genomic DNA sequence of a desired poxvirus, such that the poxvirus is reconstituted in the host cell.

2. The method of claim 1, wherein two or more DNA fragments are co-transfected into the host cell, each DNA fragment comprises a partial sequence of the poxvirus genome such that the two or more DNA fragments are assembled by homologous recombination and comprise the full-length sequence of the poxvirus genome when reconstituted in the host cell.

3. The method of claim 1 or claim 2, further comprising infecting the host cell with a helper virus before, during, or after the transfection of the one or more DNA fragments to initiate the transcription of the one or more DNA fragments.

4. The method of claim 3, wherein the helper virus is Fowl pox virus (FPV), sheep fibroma virus, vaccinia virus, or cowpox virus.

5. The method of any one of claims 1-4, wherein the one or more DNA fragments are circularized before transfection or transfected in circular forms into the host cell.

6. The method of claim 5, wherein the one or more DNA fragments are cloned into a plasmid or a bacterial artificial chromosome (BAC) vector.

7. The method of any one of claims 1-4, wherein the one or more DNA fragments are linearized before co-transfection or transfected in linearized forms into the host cell.

8. The method of any one of claims 1-7, wherein the one or more DNA fragments are naturally derived, chemically synthesized, or a combination of naturally derived and chemically synthesized DNA fragments.

9. The method of any one of claims 1-8, wherein the poxvirus genomic sequence comprises the sequence of Modified Vaccinia Ankara (MVA) Accession No. #U94848 or #AY603355.

10. The method of any one of claims 1-9, wherein two adjacent DNA fragments have an overlapping sequence to facilitate homologous recombination.

11. The method of claim 10, wherein the overlapping sequence is between about 100 bp and about 5000 bp in length.

12. The method of any one of claims 1-11, wherein the one or more DNA fragments further comprise an inverted terminal repeat (ITR) region.

13. The method of any one of claims 1-12, wherein the one or more DNA fragments further comprise a poxvirus terminal hairpin loop (HL) sequence, a poxvirus genome resolution (CR) sequence, or both, wherein the HL or the CR sequence is added to one or both ends of the DNA fragment as single stranded or double stranded DNA sequences in sense or antisense orientation.

14. The method of claim 13, wherein the one or more DNA fragments further comprise one or more HL sequences and one or more CR sequences.

15. The method of claim 14, wherein each HL sequence is flanked by two CR sequences at both ends of the HL sequence.

16. The method of any one of claims 13-15, wherein only a subset of the one or more DNA fragments comprise the HL or CR sequence.

17. The method of any one of claims 1-16, wherein the one or more DNA fragments further comprise one or more DNA sequences encoding one or more antigens, subunits, or fragments thereof or other heterologous DNA sequences.

18. The method of claim 17, wherein two or more DNA fragments comprise the DNA sequence of the same antigen, a subunit or fragment thereof or the same heterologous DNA sequence.

19. The method of claim 17, wherein two or more DNA fragments comprise the DNA sequences of different antigens, subunits, or fragments thereof or other heterologous DNA sequences.

20. The method of any one of claims 17-19, wherein the DNA sequences of the antigens, subunits, or fragments thereof or other heterologous DNA sequences are codon optimized for expression in the host cell.

21. The method of any one of claims 17-20, wherein the one or more DNA fragments further comprise a virus promoter upstream of the DNA sequences of the antigens, subunits, or fragments thereof or other heterologous DNA sequences, a transcription termination signal downstream the DNA sequences of the antigens, subunits, or fragments thereof or other heterologous DNA sequences, or both.

22. The method of any one of claims 17-21, wherein the DNA sequences encoding the antigens, subunits, or fragments thereof or other heterologous DNA sequences are inserted in one or more poxvirus insertion sites or intergenic regions.

23. An expression system comprising:
(i) a single DNA fragment comprising the entire genome of a desired poxvirus, or two or more DNA fragments each comprising a partial sequence of the genome of the desired poxvirus such that the two or more DNA fragments, when expressed in the host cell upon co-transfection, are assembled sequentially and comprise the full-length sequence of the poxvirus genome and enable reconstitution of a desired recombinant poxvirus, and
(ii) one or more DNA sequences encoding one or more antigens, subunits, or fragments thereof or other heterologous DNA sequences inserted in one or more insertion sites of the poxvirus, wherein the antigens or subunits thereof or other heterologous DNA sequences are expressed in the host cell upon transfection of the one or more poxvirus DNA fragments and reconstitution of the poxvirus.

24. The expression system of claim 23, wherein the one or more DNA fragments are circularized before transfection or transfected in circular forms into the host cell.

25. The expression system of claim 24, wherein the one or more DNA fragments are cloned into a plasmid or a BAC vector.

26. The expression system of claim 23, wherein the one or more DNA fragments are linearized before transfection or transfected in linearized forms into the host cell.

27. The expression system of any one of claims 23-26, wherein the one or more DNA fragments are naturally derived, chemically synthesized, or a combination of naturally derived and chemically synthesized DNA fragments.

28. The expression system of any one of claims 23-27, wherein the genomic sequence of the poxvirus comprises the sequence of MVA Accession No. #U94848 or #AY603355.

29. The expression system of any one of claims 23-28, wherein the two adjacent DNA fragments have an overlapping sequence to facilitate homologous recombination.

30. The expression system of claim 29, wherein the overlapping sequence is between about 100 bp and about 5000 bp in length.

31. The expression system of any one of claims 23-30, wherein the one or more DNA fragments further comprise an inverted terminal repeat (ITR) region.

32. The expression system of any one of claims 23-31, wherein the one or more DNA fragments further comprise a poxvirus terminal hairpin loop (HL) sequence, a poxvirus genome resolution (CR) sequence, or both, wherein the HL or the CR sequence is added to one both ends of the DNA fragment as single stranded or double stranded DNA sequences in sense or antisense orientation.

33. The expression system of claim 32, wherein the one or more DNA fragments further comprise one or more HL sequences and one or more CR sequences.

34. The expression system of claim 33, wherein each HL sequence is flanked by two CR sequences at both ends of the HL sequence.

35. The expression system of any one of claims 32-34, wherein only a subset of the one or more DNA fragments comprise the HL or CR sequence.

36. The expression system of any one of claims 23-35, wherein the one or more DNA fragments further comprise a virus promoter upstream the DNA sequences encoding the antigens, subunits or fragments thereof or other heterologous DNA sequences, a transcription termination signal downstream of the DNA sequences encoding the antigens, subunits or fragments thereof or other heterologous DNA sequences, or both.

37. The expression system of any one of claims 23-36, wherein the DNA sequences encoding one or more antigens, subunits or fragments thereof or other heterologous DNA sequences are inserted in one or more poxvirus insertion sites.

38. A vaccine composition for preventing or treating cancer or a virus infection comprising:
(i) a single DNA fragment comprising the entire genome of a desired poxvirus, or two or more DNA fragments each comprising a partial sequence of the genome of the desired poxvirus such that the two or more DNA fragments, when transferred in the host cell upon co-transfection, are assembled sequentially and comprise the full-length sequence of the poxvirus genome, and
(ii) one or more DNA sequences encoding one or more antigens, subunits, or fragments thereof or other heterologous DNA sequences inserted in one or more insertion sites of the poxvirus, wherein the antigens, subunits or fragments thereof or other heterologous DNA sequences are expressed in the host cell upon transfection of the one or more poxvirus DNA fragments.

39. The vaccine composition of claim 38, wherein the antigens, subunits or fragments thereof or other heterologous DNA sequences are inserted in one or more poxvirus insertion sites.

40. The vaccine composition of claim 38 or claim 39, further comprising a pharmaceutically acceptable carrier, adjuvant, additive or combination thereof.

41. A method of preventing or treating cancer or a viral infection in a subject comprising administering a prophylactically or therapeutically effective amount of a vaccine composition to the subject, wherein the vaccine comprises:
(i) a single DNA fragment comprising the entire genome of a desired poxvirus, or two or more DNA fragments each comprising a partial sequence of the genome of the desired poxvirus such that the two or more DNA fragments, when transferred in the host cell upon co-transfection, are assembled sequentially and comprise the full-length sequence of the poxvirus genome, and
(ii) one or more DNA sequences encoding one or more antigens, subunits or fragments thereof or other heterologous DNA sequences inserted in one or more insertion sites of the poxvirus, wherein the antigens, subunits, or fragments thereof or other heterologous DNA sequences are expressed in the host cell upon transfection of the one or more poxvirus DNA fragments.

42. The method of claim 41, wherein the antigens, subunits, or fragments thereof or other heterologous DNA sequences are inserted in one or more poxvirus insertion sites.

The application's sequence listing, which the Patent Office published only in electronic form, follows.

SEQUENCE LISTING (18 sequences)

SEQ ID NO: 1 - DNA, 215 bp, Artificial Sequence
  terminal CR-HL-CR
  misc_feature (1)..(20): poxvirus concatemeric resolution
  misc_feature (26)..(190): MVA terminal hairpin loop
  misc_feature (196)..(215): poxvirus concatemeric resolution
tttttttctagacactaaataaatagtaagattaaattaattataaaattatgtatataatattaattataaaattatgtatatgatttactaactttagttagataaattaataatacataaattttagtatattaatattataaattaataatacataaattttagtatattaatattatattttaaatatttatttagtgtctagaaaaaaa

SEQ ID NO: 2 - DNA, 215 bp, Artificial Sequence
  terminal CR-HL-CR
  misc_feature (1)..(25): poxvirus concatemeric resolution
  misc_feature (26)..(190): MVA terminal hairpin loop
  misc_feature (191)..(215): poxvirus concatemeric resolution
tttttttctagacactaaataaatatttaaaatataatattaatatactaaaatttatgtattattaatttataatattaatatactaaaatttatgtattattaatttatctaactaaagttagtaaatcatatacataattttataattaatattatatacataattttataattaatttaatcttactatttatttagtgtctagaaaaaaa

SEQ ID NO: 3 - DNA, 165 bp, Artificial Sequence
  MVA terminal hairpin loop
gtaagattaaattaattataaaattatgtatataatattaattataaaattatgtatatgatttactaactttagttagataaattaataatacataaattttagtatattaatattataaattaataatacataaattttagtatattaatattatattttaaa

SEQ ID NO: 4 - DNA, 165 bp, Artificial Sequence
  MVA terminal hairpin loop
tttaaaatataatattaatatactaaaatttatgtattattaatttataatattaatatactaaaatttatgtattattaatttatctaactaaagttagtaaatcatatacataattttataattaatattatatacataattttataattaatttaatcttac

SEQ ID NO: 5 - DNA, 154 bp, Artificial Sequence
  terminal CR-HL-CR
  misc_feature (1)..(25): poxvirus concatemeric resolution
  misc_feature (26)..(129): Vaccinia terminal hairpin loop
  misc_feature (130)..(154): poxvirus concatemeric resolution
tttttttctagacactaaataaaatatttaaaatataatattaatgtactaaaacttatatattattaatttatctaactaaagttagtaaattatatatataattttataattaatttaattttactaattttatttagtgtctagaaaaaaa

SEQ ID NO: 6 - DNA, 154 bp, Artificial Sequence
  terminal CR-HL-CR
  misc_feature (1)..(25): poxvirus concatemeric resolution
  misc_feature (26)..(129): Vaccinia terminal hairpin loop
  misc_feature (130)..(154): poxvirus concatemeric resolution
tttttttctagacactaaataaaattagtaaaattaaattaattataaaattatatatataatttactaactttagttagataaattaataatatataagttttagtacattaatattatattttaaatattttatttagtgtctagaaaaaaa

SEQ ID NO: 7 - DNA, 104 bp, Artificial Sequence
  Vaccinia virus terminal hairpin loop
tagtaaaattaaattaattataaaattatatatataatttactaactttagttagataaattaataatatataagttttagtacattaatattatattttaaat

SEQ ID NO: 8 - DNA, 104 bp, Artificial Sequence
  Vaccinia virus terminal hairpin loop
atttaaaatataatattaatgtactaaaacttatatattattaatttatctaactaaagttagtaaattatatatataattttataattaatttaattttacta

SEQ ID NO: 9 - DNA, 20 bp, Artificial Sequence
  MVA concatemer resolution
tttttttctagacactaaat

SEQ ID NO: 10 - DNA, 20 bp, Artificial Sequence
  MVA concatemer resolution
atttagtgtctagaaaaaaa

SEQ ID NO: 11 - DNA, 60021 bp, Artificial Sequence
  sMVA fragment 1
ggcctagcaggccggcctttttttctagacactaaataaatagtaagattaaattaattataaaattatgtatataatattaattataaaattatgtatatgatttactaactttagttagataaattaataatacataaattttagtatattaatattataaattaataatacataaattttagtatattaatattatattttaaatatttatttagtgtctagaaaaaaatgtgtgaccaacgaccgtaggaaactctagagggtaagaaaaatcaatcgctttatagagaccatcagaaagaggtttaatatttttgtgagaccatcgaaggagaaagagataaaacttttttacgactccatcagaaagaggtttaatatttttgtgagaccatcgaagagagaaagagataaaacttttttacgactccatcagaaagaggtttaatatttttgtgagaccatcgaagagagaaagagataaaacttttttacgactccatcagaaagaggtttaatatttttgtgagaccatcgaaggagaaagagataaaacttttttacgactccatcagaaagaggtttaatatttttgtgagaccatcgaaggagaaagagataaaacttttttacgactccatcagaaagaggtttaatatttttgtgagaccatcgaaggagaaagagataaaacttttttacgactccatcagaaagaggtttaatatttttgtgagaccatcgaagagagaaagagataaaacttttttacgactccatcagaaagaggtttaatatttttgtgagaccatcgaaggagaaagagataaaacttttttacgactccatcagaaagaggtttaatatttttgtgagaccatcgaagagagaaagagaataaaaatattttagtgacaccatcagaaagaggtttaatatttttgtgagaccatcgaagagagaaagagataaaacttttttacgactccatcagaaagaggtttaatatttttgtgagaccatcgaaggagaaagagataaaacttttttacgactccatcagaaagaggtttaatatttttgtgagaccatcgaagagagaaagagataaaacttttttacgactccatcagaaagaggtttaatatttttgtgagaccatcgaagagagaaagagataaaacttttttacgactccatcagaaagaccatcgaagagagaaagagaaagagatagttagtctagatatttttcttagtacaaaagtcaatgttttaaaatatatggacaagaatttgtctgtataaaaacttgtgtgaaattttgtaccaaagaaaaaatgtgagcagtatcccctacatggattttactagatcatttatataccaaaaaatattatacgatctacgttttattatatgattttaacgtgtaaattataaacattattttatgatatacaattgtctggtaacctagatgggcataggggatgagtatatgttgttggacgttattgtttaagaaatagttgatgcatcagaaagaggtttaatatttttgtgagaccatcgaagagagaaagagataaaacttttttacgactccatcagaaagaggtttaatatttttgtgagaccatcgaagagagaaagagataaaacttttttatgactccattgaagagagaatgagaataaaaatattttagtgacaccatcagaaagaggtttaatattttttatgagaccatcaaagagagaaagagaataaaaatattttatgactccattgaagagagaaagagaaaatgagaataaaaatattttagtgacaccatcagaaagaggtttaatattttttatgagaccatcaaagagagaaagagaataaaaatatttttgtaaaactttttttatgagaccatcaaagagagaaagagaataaaaatatttttgtaaaactttttttatgagaccatcaaagagagaaagagaataaaaatatttttgtaaaactttttttatgagaccatcaaagagagaaagagaataaaaatatttttgtaaaactttttttatgagaccatcaaagagagaaagagaataaaaatatttttgtaaaactttttttatgagaccatcaaagagagaaagagaataaaaatatttttgtaaaactttttttatgagaccatcaaagagagaaagagaataaaaatatttttgtaaaactttttttatgagaccatcaaagagagaaagagaataaaaatattttatgactccattgaagagagaaagagaataaaaatattttagtgacaccatcagaaagaggtttaatatttttgtgagaccatcgaagagagaaagagaataaaaatattttatgactccattgaagagagaaagagaataaaaatattttagtgacaccatcagaaagaggtttaatattttttatgagaccatcaaagagagaaagagaataaaaatatttttgtaaaactttttttatgagaccatcaaagagagaaagagaataaaaatatttttgtaaaactttttttatgagaccatcaaagagagaaagagaataaaaatatttttgtaaaactttttttatgagaccatcaaagagagaaagagaataaaaatatttttgtaaaactttttttatgagaccatcaaagagagaaagagaataaaaatatttttgtaaaactttttttatgagaccatcaaagagagaaagagaataaaaatattttatgactccattgaagagagaatgagaataaaaatattttagtgacaccatcagaaagaggtttaatatttttgtgagaccatcgaagagagaaagagaataaaaatattttatgactccattgaagagagaaagagaataaaaatattttagtgacaccatcagaaagaggtttaatattttttatgagaccatcaaagagagaaagagaataaaaatatttttgtaaaactttttttatgagaccatcaaagagagaaagagaataaaaatatttttgtaaaactttttttatgagaccatcaaagagagaaagagaataaaaatatttttgtaaaactttttttatgagaccatcaaagagagaaagagaataaaaatatttttgtaaaactttttttatgagaccatcaaagagagaaagagaataaaaatatttttgtaaaactttttttatgagaccatcaaagagagaaagagaataaaaatatttttgtaaaactttttttatgagaccatcaaagagagaaagagaataaaaatatttttgtaaaactttttttatgagaccatcaaagagagaaagagaataaaaatattttatgactccattgaagagagaatgagaataaaaatattttagtgacaccatcagaaagaggtttaatatttttgtgagaccatcgaagagagaaagagaataaaaatattttatgactccattgaagagagaatgagaataaaaatattttagtgacaccatcagaaagaggtttaatattttttatgagaccatcaaagagagaaagagaataaaaatatttttgtaaaactttttttatgagaccatcaaagagagaaagagaataaaaatatttttgtaaaaattataaacattattttatgatatacaattgtctggtaacctagatgggcataggggatgttgataagctcgacgagtatatgttgttggacgttattgtttaagaaatagttgatgcatcagaaagagaataaaaaatattttagtgagaccatcgaagagagaaagagataaaacttttttacgactccatcagaaagaggtttaatatttttgtgagaccatcgaagagagaaagagataaaacttttttacgactccatcagaaagaggtttaatatttttgtgagaccatcgaaggagaaagagataaaacttttttacgactccatcagaaagaggtttaatatttttgtgagaccatcaaagagagaaagagaataaaaatatttttgtaaaactttttttatgagaccatcaaagagagaaagagaataaaaatatttttgtaaaactttttttatgagaccatcaaagagagaaagagaataaaaatatttttgtaaaactttttttatgagaccatcaaagagagaaagagaataaaaatatttttgtaaaactttttttatgagaccatcaaagagagaaagagaataaaaatattttatgactccattgaagagagaatgagaataaaaatattttagtgacaccatcagaaagaggtttaatatttttgtgagaccatcgaagagagaaagagaataaaaatattttatgactccattgaagagagaatgagaataaaaatattttagtgacaccatcagaaagaggtttaatattttttatgagaccatcaaagagagaaagagaataaaaatatttttgtaaaactttttttatgagaccatcaaagagagaaagagaataaaaatatttttgtaaaactttttttatgagaccatcaaagagagaaagagaataaaaatatttttgtaaaactttttttatgagaccatcaaagagagaaagagaataaaaatatttttgtaaaactttttttatgagaccatcaaagagagaaagagaataaaaatattttatgactccattgaagagagaatgagaataaaaatattttagtgacaccatcagaaagaggtttaatatttttgtgagaccatcgaagagagaaagagaataaaaatattttatgactccattgaagagagaaagagaataaaaatattttagtgacaccatcagaaagaggtttaatattttttatgagaccatcaaagagagaaagagaataaaaatatttttgtaaaactttttttatgagaccatcaaagagagaaagagaataaaaatattttatgactccattgaagagagaatgagaataaaaatattttagtgacaccatcagaaagaggtttaatatttttgtgagaccatcgaagagagaaagagaataaaaatattttatgactccattgaagagagaatgagaataaaaatattttagtgacaccatcagaaagaggtttaatatttttgtgagaccatcgaagagagaaagagaataaaaatattttatgactccattgaagagagaatgagaataaaaatattttagtgacaccatcagaaagaggtttaatattttttatgagaccatcaaagagagaaagagaataaaaatatttttgtaaaactttttttatgagaccatcaaagagagaaagagaataaaaatatttttgtaaaactttttttatgagaccatcaaagagagaaagagaataaaaatatttttgtaaaactttttttatgagaccatcaaagagagaaagagaataaaaatatttttgtgagaccatcaaagagagaaagagaataaaaatatttttgtgagaccatcaaagagagaaagagaataaaaatatttttgtgagaccatcaaagagagaaagagaataaaaatattttatgactccattgaagagagaaagagaataaaaatattttagtgacaccatcagaaagaggtttaatatttttgtgagaccatcgaagagagaaagagaataaaaatattttatgactccattgaagagagaaagagaataaaaatattttagtgacaccatcagaaagaggtttaatattttttatgagaccatcaaagagagaaagagaataaaaatattttttatgagaccatcaaagagagaaagagaataaaaatattttatgagaccatcaaagagagaaagagaataaaaatattttttatgagaccatcaaagagagaaagagaataaaaatattttatgagaccatcaaagagagaaagagaataaaaatattttttatgagaccatcaaagagagaaagagaataaaaatatttttgtatgagaccatcagaaagaggtttaatatttttgtgataccctgaaaggaaataggaatagtgtcataatcgtatcacactattgagacagaaaaagaagaagtcgcgagaggtaactttttgttttgcaaaccggaatatagtgtccggtacacttttttaattcgtggtgtgcctgaatcgttcgattaaccctactcatccaatttcagatgaatagagttatcgattcagacacacgctttgagttttgttgaatcgatgagtgaagtatcatcggttgcaccttcagatgccgatccgtcgacatacttgacctcaagttcagatgattccttgcacatgtctccgatacgaacgctaaactctagattcttgacacattttgtatcgacgatcgttgaaccgatgatatcttcgtaactcactttcttatgagagatgttagacccgagtactggatgggtcttgatgtcgctgtctttctcttcttcgctacatctgatgtcgatagacacctcacagtctttccatcagcggattctgagatggatttaatctgaggacatttggtgaatccaaagttcattctcagacctccaccgatgatggagtaataagtggtaggaggatctacatcctcgactgattccacctcgggatctggatctgactcggactctgtaatttccgttacggattggcaaatcttatcatcggtcggtgtttggtcttgctttgtgactttgataataacatcgattcccatatgatgtttgttttcttcttccgtacacgatgaggatgattgctgaagactggcaggcacatgcatgccagtacgatatattgtttcatgattgctattgattgagtactgttctttatgattctacttccttaccgtgcaataaattagaatatattttctacttttacgagaaattaattattgtatttatgggtgaaaaacttactataaaaagcgggtgggtttggaattagtgatcagtttatgtatatcgcaactaccgggcatatggctacattacccacatgataagagattgtatcagtttcgtagtcttgagtattggtattactatatagtatatagatgtcgacgctagagttactgtctccgaatgcggcatgatagtatcattctttgctttcgttaactgtttggaggaagaatctttgttattgcatttaatctcgaaattcagagtgcacacctttctcctgtaaagaaacctgaagtcgctaccttattaagaagacgggatcgcagtctttatgattcatagtaatagttagttccgacgttgagatggattcgctgagaccggtagtggtcgtccgagtacacgatgtgtcgttaactggatacaggttaatttccacatcgatatagttaaaggtatttctgggtacgggttcgcatttatctgcggaagagacggtgtgagaatatgttccgagaccacacggagaacagatgacgtctccggatactccgtatcctattccacattttgtttgggaaacacatgccttgcatccatgatcgggagagcattcacagattctattgtgagtcgtgttacacgatcgcgtcgacattgttgacagaaacgtgaccttcattcttaccgtcgtccataaatacgttaggtatgtaccacatactgtcgcgaacgatgcgtccatctcataatgatttactttttcataattaaagatgtgaaagaaaaccgaacaatatatttttttagtaatgtttatgcgagacatataaaataaactccgtgtttatgatgccggtaaatgtttttatcatcttggacggaatcgattttgtaatatgccatggaaacaggacattatcactccatgataaattatttaatggagtcgatcctctcattgttctttgcgtatctcaatctgtggcgtttgcttcgtttaaataatatatcaaacatggagacgcctgatatgtaggcattcttcattctattaatgtctgctctatagcgctttagttccttatgacgaccggcgatatcatacttactttagaaggaaaatcatcatctaggattaaggcgtatctgatacaggcgaataatggttcaggatatagatagcgtatatctctattaaatgcgtcaatcatagtctctagagtgggatggtaactcagtaataaatcaactagcttctctttggtaactgcttttctggatggccgtattgattatcgagcgtgacactcgctccatattccaataaccgctttgcaaattgtatattattgacatcgaccgcgtaatatagtagagttatcgatcatatctatatcatccatgtacttgcttagtatatcaaatacatcttcataacagtgatacccgcaattattaaatctcgataatatcagaccgtacatacatagacggccattgttagatatgtgatttacagccgcgtgtccatattttccacgataaaccttacgacgtttacatcgacgagattattattaacaaagttgttgtccgtcgtcttatccaacatgcattgaatgataggtatacttaccatatcgccgtaatgtaagtagtttatcagtatggcttgtacgatggattcatcctgttgtctaaatctctttagaatgttatcgatgatgtagtggttatattctctggaatcgtacgaagtaatactacgcattacgtcgacaagagtatgacgtctctcaataagaagattaacgatttccatgtctacattatatggggttactctaaatcgcttgtttagataatacgcctctaatatagggctgacgtcgtatactctacacgtgtccacatcctttattaataatctctatatctatggttgagcaagaccagtagtattggatggaaacattgttatcgatcaaacatttaattacatccttggatagagattctctatgagacgatatatagtaatgaagagagttcttacacatatcactgttgtacatacaggtacgaaatacgtaaccggtgctgtaacattctgatttaagaagccatagcaatacttctggtctcggattaggcgtcgttacgtatatatccaccaatccgagaccattgattgcataattcgtattcttggacggacgtatccgtttatccacaattaggtattttagcagacgtaagtcgaaatcatttatattcgacttgagttcgttagaggaattcgaatagctggatatcagtagatgcacaatctgagattttacgtatctatgcttactgtatgctcctagcggagttaatccttcgttgtttctacaaagtctctcgactccgcgagagagtaacagtcgaacaatcttaatgtctgtatcgcatttattggagacgtaacaatgtagcgcattgtttcctcgtctatctatatgttttgataagttgtgacacgtttcaatttctagttttatttttttgtacgtcacatcttcatccagtagacgacatagaatacatgtgcaatccatagctattctggtgctaattattcctcataagatgataaaaagtgtagtgagagagcatgaaggagatttagtatttagcagtgcggatatgatccaagagggtgagatagtcgttctcgttcagaatctttcgcagcataagtagtatgtcgatatacttatcgttgaagactcttccagagacgatagctgattgagtacaaagtccaatgattgcacgaagttcttcggcggttttcatggagtcatttctgatgaaacatttaatgatctaaatttcagtttatgtttgtaccccgtattcatacttaacaaattggtattacataccattaataatgcaagcataaaaaatcgttagtagatgtttctaaatataggttccgtaagcaaagaatataagaatgaagcggtaatgataaaatcaatcgttatctaaaatgatcatactcatttattttattctattatattaacacatacatttttaacagcaacacattcaatattgtattgttatttttatattatttacacaattaacaatatattattagtttatattactgaattaataatataaaattcccaatcttgtcataaacacacactgagaaacagcataaacacaaaatccatcaaaaatgttgataaattatctgatgttgttgttcgctgctatgataatcagatcattcgccgatagtggtaacgctatcgaaacgacatcgccagaaattacaaacgctacaacagatattccagctatcagattatgcggtccagagggagatggatattgtttacacggtgactgtatccacgctagagatatcgacggtatgtattgtagatgctctcatggttatacaggcattagatgtcagcatgtagtattagtagactatcaacgttcagaaaaaccaaacactacaacgtcatatatcccatctcccggtattatgcttgtattagtaggcattattattattacgtgttgtctattatctgtttataggttcactcgacgaactaaactacctatacaagatatggttgtgccataatttttataaattttttttatgagtatttttacaaaaatgtataaagtgtatgtcttatgtatatttataaaaatgctaaatatgcgatgtatctatgttatttgtatttatctaaacaatacctctacctctagatattatacaaaaattttttatttcggcatattaaagtaaaatctagttaccttgaaaatgaatacagtgggtggttccgtatcaccagtaagaacataatagtcgaatacagtatccgattgagattttgcatacaatactagtctagaaagaaatttgtaatcatcttctgtgacgggagtccatatatctgtatcatcgtcccatgctatattcctgttatcatcattagttaatgaaaataactctcgtgcttcagaaaagtcaaatattgtatccatacatacatctccaaaactatcgcttatacgtttatctttaacgatacctatacctagatggttatttactaacagacattttccagatctattgactataactcctatagtttccacatcaaccaagtaatgatcatctattgttatataacaataacataactcttttccgtttttatcagtatgtatatctatatcaacgtcgtcgttgtagtgaatagtagtcattgatctattatatgaaacggatatgtctagaacggcaattgttttacgtccagttaacactttcgttgatttaaagtctagagtctttgcaaacataatatccttatccgactttatatttcctgtagggtggtataattttattttgcctccacatatcggtgtttccaaatatattactagacaatattccatatagttattagttaagggtacccaattagaacacgtacgcttattatcatcatttggatcgtatttcataaaagttattgtactatcgatgtcaacacattctacattttttaatcgtctatatagtatttttctgatattttctataatatcagaattgtcttccatcggaagttgtatactatcggaatcagttacatgtttaaataattctctgatgtcattccttatacaatcaaattcattattaaacagtttaatagtctgtagacctttatcgtcgtaaatatccattgtcttattagttacgcttatttttatgtgtttttacgttgctttattatattttataagaatgattgtttgacgaatcacgagaactattaagacacattattaggtatatattataaaaaagtttttgattacgatgttataagaggaaagaggacacattaacatcatacatcaattaactacattcttataacatcgtaatcaaaagaattgcaattttgatgtataacaactgtcaatgggttatggaattgtatattacatattatacggtatgttggtaacgacaaataccgatcggtaattgtctgccggtgtaatagaattatatatatctatctattacaccggccttgtatacataataataagttgtggtagtatgatctccatatttataatttaggactttgtattcagtttttttggaatcataaaaaataaaaaaaagttttactaatttaaaattatttacatttttttcactgtttagtcgcggatatggaattcgatcctgccaaaatcaatacatcatctatagatcatgtaacaatattacaatacatagatgaaccaaatgatataagactaacagtatgcattatcacaaaaataaatccacatttggctaatcaatttcgggcttggaaaaaacgtatcgccggaagggactatatgactaacttatctagagatacaggaatacaacaatcaaaacttactgaaactgtcaaaaaaatagaaacatatatggtctatatatacactacaatttagttattaattggataaccgatgtgattatcaatcaatattaagaaggttggtaaattggtacatagctaataatacctatacacccaataatacaacaaccatttctgagttggatatcatcaaaatactggataaatacgaggacgtgtatagagtaagtaaagaaaaagaatgtgaaatttgctatgaagttgtttactcaaaacgatagatactttggtttattggattcgtgtaatcatatattttgcataacatgcatcaatatatggcatagaacacgaagagaaaccggtgcgtcggataattgtcctatatgtcgtacccgttttagaaacataacaatgagcaagttaactaataaataaaaagtttaatttgttgacgacgtatgtcgttattttttctcgtataaaagattaatttgattctaatataatctttagtattggataaatatcaattcaaattaattccattagattatatcataaataaaaatagtagcacgcactacttcagccaaatattcttttttgaaacgccatctatcgtagtgaggacacaagtgaacctataatgagcaaatttattagtatcggttacatgaaggactttacgtagagtggtgattccactatctgtggtacgaacggtttcatcttctttgatgccatcacccagatgttctataaacttggtatcctttgccaaccaatacatatagctaaactcaggcatatgttccacacatcctgaacaatgaaattctccagaagatgttacaatgtctagatttggacatttggtttcaaccgcgttaacatatgagtgaacacacccatacatgaaagcgatgagaaataggattttcatcttgccaaaatatcactagaaaaaatttatttatcaattttaaaggtataaaaaatacttattgttgctcgaatattttgtatttgatggtatacggaagattagaaatgtaggtattatcatcaactgattctatggttttatgtattctatcatgtttcactattgcgttggaaataatatcatatgcttccacatatattttattttgttttaactcataatactcacgtaattctggattattgacatatctatgaataattttagctccatgatcagtaaatattaatgagaacatagtattaccacctaccattatttttttcatctcattcaattcttaattgcaaagatctatataatcattatagcgttgacttatggactctggaatcttagacgatgtacagtcatctataatcatggcatatttaatacattgttttatagcatagtcgttatctacgatgttagatatttctctcaatgaatcaatcacacaatctaatgtaggtttatgacataatagcattttcagcagttcaatgtttttagattcgttgatggcaatggctatacatgtatatccgttatttgatctaatgttgacatctgaaccggattctagcagtaaagatactagagattgtttattatatctaacagccttgtgaagaagtgtttctcctcgtttgtcaatcatgttaatgtctttaagataaggtaggcaaatgtttatagtactaagaattgggcaagcataagacatgtcacaaagaccctttttgtatgtataagtgtaaaaattataacattcatagttggatttacataggtgtccaatcgggatctctccatcatcgagataattgatggcatctcccttccttttttagtagatatttcatcgtgtaagaatcaatattaatatttctaaagtatccgtgtatagcctctttatttaccacagttccatattccactagagggatatcgccgaatgtcatatactcaattagtatatgttggaggacatccgagttcattgttttcaatatcaaaaagatggtttccttatcatttctccatagtggtacaatactacacattattccgtgcggctttccattttccaaaaacaatttgaccaaatctacatctttattgtatctataatcactatttagataatcagccataattactcgagtgcaacatgttagatcgtctatatatgaataagccgtgttatctattcctttcattaacaatttaacgatgtctatatctatatgagatgacttaatataatattgaagagctgtacaatagtttttatctataaaagacggcttgattccgtgattaattagacatttaacaacttccggacgcacatatgctctcgtatccgactctgaatacagatgagagatgatatacagatgcaatacggtaccgcaatttcgtagttgataatcatcatacgcgtatcagtactcgtcctcataaagaacactgcagccattttctatgaacaaatcaataatttcaggaacaggatcatctgtcattacataattttctataactgaacgatggttttcacatttaacactcaagtcaaatccatgttctaccaacacctttatcaagtcaacgtctacatttttggatttcatatagctgaatatattaaagtcatttatgttgctaaatccagtggcttctagtagagccatcgctatatcctttaactttaacatgtctactatttgtgtattcttctaatggggtagctgtctccaatttttgcgtaatggattagtgccactgtctagtagtagtttgacgacctcgacattattacaatgctcattaaaaaggtatgcgtgtaaagcattattcttgaattggttcctggtatcattaggatctctgtctctcaacatctgtttaagttcatcgagagccacctcctcattttccaaatagtcaaacattttgactgaatgagctactgtgaactctatacacccacacaactaatgtcattaaatatcatgtcaaaaacttgtacaattattaataaaaataatttagtgtttaaattttaccagttccagattttacacctccgttaaccccactttttacaccactggacgatcctcctccccacattccaccgccaccagatgtataagttttagatcctttattactaccatcatgtccatggataaagacactccacatgccgccactaccccctttagaagacatattaataagacttaaggacaagtttaacaataaaattaatcacgagtaccctactaccaacctacactattatatgattatagtttctatttttacagtaccttaactaaagtctctagtcacaagagcaatactaccaacctacactattatatgattatagtttctatttttataggaacgcgtacgagaaaatcaaatgtctaatttctaacggtagtgttgataaacgattatcgtcaatggatacctcctctatcatgtcgtctattttcttactttgttctattaacttattagcattatatattatttgattataaaacttatattgcttattagcccaatctgtaaatatcggattattaacatatcgtttctttgtaggtttatttaacatgtacatcactgtaagcatgtccgtaccatttattttaatttgacgcatatccgcaatttctttttcgcagtcggttataaattctatatatgatggatacatgctacatgtgtacttataatcgactaatatgaagtacttgatacatattttcagtaacgatttattattaccacctatgaataagtacctgtgatcgtctaggtaatcaactgttttcttaatacattcgatggttggtaatttactcagaataatttccaatatcttaatatataattctgctatttctgggatatatttatctgccagtataacacaaatagtaatacatgtaaacccatattttgttattatattaatgtctgcgccattatctattaaccattctactaggctgacactatgcgacttaatacaatgataaagtatactacatccatgtttatatcatcaatatacggcttacaaagttttagtatcgataacacatccaactcacgcatagagaaggtagggaataatggcataatatttattaggttatcatcattgtcattatctacaactaagtttccattttttaaaatatactcgacaactttaggatctctattgccaaatttttgaaaatatttatttatatgcttaaatctatataatgtagctccttcatcaatcatacatttaataacattgatgtatactgtatgataagatacatattctaacaatagatcttgtatagaatctgtatatcttttaagaattgtggatattattacgtaaactattacacaattctaaaatataaaacgtatcacggtcgaataatagttgatcaactatataattatcgattttgtgatttttcttcctaaactgtttacgtaaatagttagatagaatattcattagttcatgaccactatagttactatcgaataacgcgtcaaatatttcccgtttaatatcgcatttgtcaagataataatagagtgtggtatgttcacgataagtataataacgcatctctttttcgtgtgaaattaaatagtttattacgtccaaagatgtagcataaccatcttgtgacctagtaataatataataatagagaactgttttacccattctatcatcataatcagtggtgtagtcgtaatcgtaattgtctaattcatcatcccaattataatattcaccagcacgtctaatctgttctattttgatcttgtatccatactgtatgttgctacatgtaggtattcctttatccaataatagtttaaacacatctacattgggatttgatgttgtagcgtatttttctacaatattaataccatttttgatactatttatttctatacctttcgaaattagtaatttcaataagtctatatcgatgttatcagaacatagatattcgagtatatcaaaatcattgatatttttatagtcgactgacgacaataacaaaatcacaacatcgtttttgatattattatttttcttggtaacgtatgcctttaatggagtttcaccatcatactcatataatggatttgcaccactttctatcaatgattgtgcactgctggcatcgatgttaaatgttttacaactatcatagagtatcttatcgttaaccatgattggttgttgatgctatcgcattttttggtttctttcatttcagttatgtatggatttagcacgtttgggaagcatgagctcatatgatttcagtactgtagtgtcagtactattagtttcaataagatcaatctctagatctatagaatcaaaacacgataggtcagaagataatgaatatctgtaggcttcttgttgtactgtaacttctcgttttgttagatgtttgcatcgtgctttaacatcaatggtacaaattttatcctcgctttgtgtatcatattcgtccctactataaaattgtatattcagattatcatgagatgtgtatacgctaacggtatcaataaacggagcacaccatttagtcataaccgtaatccaaaaatttttaaagtatatcttaacgaaagaagttgtgtcattgtctacggtgtatggtactagatcctcataagtgtatatatctagagtaatgtttaatttatcaaatggttgataatatggatcctcatgacaatttccgaagatggaaatgagatatagacatgcaataaatctaattgcggacatggttactccttaaaaaaatacgaataatcaccttggctatttagtaagtgtcatttaacactatactcatattaatccatggactcataatctctatacgggattaacggatgttctatatacggggatgagtagttttcttctttaactttatactttttactaatcatatttagactgatgtatgggtaatagtgtttaaagagttcgttctcatcatcagaataaatcaatatctctgtttttttgttatacagatgtattacagcctcatatattacgtaatagaacgtgtcatctaccttattaactttcaccgcatagttgtttgcaaatacggttaatcctttgacctcgtcgatttccgaccaatctgggcgtataatgaatctaaactttaatttcttgtaatcattcgaaataatttttagtttgcatccgtagttatcccctttatgtaactgtaaatttctcaacgcgatatctccattaataatgatgtcgaattcgtgctgtatacccatactgaatggatgaacgaataccgacggcgttaatagtaatttactttttcatctttacatattgggtactagttttactatcataagtttataaattccacaagctactatggaataagccaaccatcttagtataacacacatgtcttaaagtttattaattaattacatgttgttttatatatcgctacgaatttaaacagagaaatcagtttaggaaaaaaaaatatctatctacatcatcacgtctctgtattctacgatagagtgctactttaagatgagacatatccgtgtcatcaaaaatatactccattaaaatgattattccggcagcgaacttgatattggatatatcacaacctttgttaatatctacgacaatagacagcagtcccatggttccataaacagtgagtttatctttctttgaagagatattttgtagagatcttataaaactgtcgaatgacatcgcatttatatctttagctaaatcgtatatgttaccatcgtaatatctaaccgcgtctatcttaaacgtttccatcgctttaaagacgtttccgatagatggtctcatttcatcagtcatactgagccaacaaatataatcgtgtataacatctttgatagaatcagactctaaagaaaacgaatcggctttattatacgcattcatgataaacttaatgaaaaatgtttttcgttgtttaagttggatgaatagtatgtcttaataattgttattatttcattaattaatatttagtaacgagtacactctataaaaacgagaatgacataactagttatcaaagtgtctaggacgcgtaattttcatatggtatagatcctgtaagcattgtctgtattctggagctattttctctatatctaatttctgaacgttcaccaatgtctctagccactttggcactaatagcgatcattcgcttagcgtcttctatattattaactggttgattcaatctatctagcaatggaccgtcggacagcgtcattctcatgttcttaatcaatgtacatacatcgccgtcatctaccaattcatccaacaacataagctttttaaaatcatcattataataggtttgatcgttgtcatttctccaaagaatatatctaataagtagagtcctcatgattagttaacaactattttttatgttaaatcaattagtacaccgctatgtttaatacttattcatattttagtttttaggattgagaatcaatacaaaaattaatgcatcattaattttagaaatacttagtttccacgtagtcaatgaaacatttgaactcatcgtacaggacgttctcgtacaggacgtaactataaaccggtttatatttgttcaagatagatacaaatccgataactttttttacgaattctacgggatccactttaaaagtgtcataccgggttctttttatttttttaaacagattaatggtgtgatgttgattaggtcttttacgaatttgatatagaatagcgtttacatattctccataatggtcaatcgccatttgttcgtatgtcataaattctttaattatatgacactgtgtattatttagttcatccttgttcatcattaggaatctatccaatatggcaattatactagaactataggtgcgttgtatacacatattgatgtgtctgtttatacaatccatgctactaccttcgggtaaaattgtagcatcatataccatttctagtactttaggttcattgttatccattgcagaggacgtcatgatcgcatcctaaaaaaatatattatttttatgttattttgttaaaaataatcatcgaatacgaatcatccagtccactgaatagcaaaatctttactattttggtatcttccaatgtggctgcctgatgtaatggaaattcattctctagaagatttttcaatgctccagcgttcaacaacgtacatactagacgcacgttattatcagctattgcataatacaaggcactatgtccatggacatccgccttaaatgcatctttgctagagagaaagcttttcagctgcttagacttccaagtattaattcgtgacagatccatgtctgaaacgagacgctaattagtgtataatttttgtcatattgcaccagaattaataatatctctaatagatctgattagtagatacatggctatcgcaaaacaacatatacacatttaataaaaataatatttattaagaaaattcagatttcacgtacccatcaatataaataaaataatgattccttacaccgtacccatattaaggagattctaccttacccataaacaatataaatccagtaatatcatgtctgatgatgaacacaaatggtgtattaaattccagtttttcaggagatgatctcgccgtagctaccataatagtagatgcctctgctacagttccttgttcgtcgacatctatctttgcattctgaaacattttataaatatataatgggtccctagtcatatgtttaaacgacgcattatctggattaaacatactaggagccatcatttcggctatcgacttaatatccctcttattttcgatagaaaatttagggagtttaagattgtacactttattccctaattgaaacgaccaatagtctaattttgcagccgtaatagaatctgtgaaatgggtcatattatcacctattgccaggtacatactaatattagcatccttatacggaaggcgtaccatgtcatattctttgtcatcgattgtgattgtatttccttgcaatttagtaactacgttcatcatgggaaccgttttcgtaccgtacttattagtaaaactagcattgcgtgttttagtgatatcaaacggatattgccatatacctttaaaatatatagtattaatgattgcccatagagtattattgtcgagcatattagaatctactacattagacataccggatctacgttctactatagaattaattttattaaccgcatctcgtctaaagtttaatctatataggccgaatctatgatattgttgataatacgacggtttaatacacacagtattatctacgaaactttgataagttagatcagtgtacgtatatttagatgttttcagcttagctaatcctgatattaattctgtaaatgctggacccagatctctttttctcaaatccatagtcttcaataattctattctagtattacctgatgcaggcaatagcgacataaacatagaaaacgaataaccaaacggtgagaagacaatattatcatcttgaatatttttatacgctactataccggcattggtaaatccttgtagacgataggtagacgctgaacacgttaacgatagtatcaataacgcaatcatgattttatggtattaataattaaccttatttttatgttcggtataaaaattattgatgtctacacatccttttgtaattgacatctatatatccttttgtataatcaactctaatcactttaacttttacagttttccctaccagtttatccctatattcaacatatctatccatatgcatcttaacactctctgccaagatagcttcagagtgaggatagtcaaaaagataaatatatagagcataatcattctcgtatactctgccctttattacatcgcccgcattgggcaacgaataacaaaatgcaagcatcttgttaacgggctcgtaaattgggataaaaattatgtttttatatctattttattcaagagaatattcaggaatttctttttccggttgtatctcatcgcagtatatatcatttgtacattgtttcatattttttaatagtttacaccttttagtaggactagtatcgtacaattcatagctgtattttgaattccaatcacgcataaaaatatcttctaattgttgacgaagacctaatccatcatccggtgtaatattaatagatgctccacatgtatccgtaaagtaatttcctgtccaatttgaggtacctatataggccgttttatcggttaccatatatttggcatggtttaccctagaatacggaatgggaggatcagcatctggtacaataaatagctttacttctatatttatgtttttagattttagcatagcgatagatcttaaaaagtttctcatgataaacgaagatcgttgccagcaactaatcaatagcttaacggatacttgtctgtctatagcggatcttcttaattcatcttctatataaggccaaaacaaaattttacccgccttcgaataaataatagggataaagttcataacagatacataaacgaatttactcgcatttctaatacatgacaataaagcggttaaatcattggttctttccatagtacatagttgttgcggtgcagaagcaataaatacagagtgtggaacaccacttacgttaatactaagaggatgatctgtattataatacgacggataaaagtttttccaattatatggtagattgttaactccaagataccagtatacctcaaaaatttgagtgagatccgctgccaagttcctattattgaagatcgcaatacccaattctttgacctgagttagtgatctccaatccatgttagcgcttcctaaataaatatgtgtattatcagatatccaaaattttgtatgaagaactcctcctaggatatttgtaatatctatgtatcgtacttcaactccggccatttgtagtctttcaacatcctttaatggtttgttagatttattgacggctactctaactcgtactcctcttttgggtaattgtacaatctcgtttaatattatcgtgccgaaattcgtacccacttcatccgataaactccaataaaaagatgatatatctagtgtttttgtggtattggatagaatttccctccacatgttaaatgtagacaaatatactttatcaaattgcatacctataggaatagtctctgtaatcactgcgattgtattatccggattcattttatttgttaaaagaataatcctatatcacttcactctattaaaaatccaagtttctatttctttcatgactgattttttaacttcatccgtttccttatgaagatgatgtttggcaccttcataaatttttatttctctattacaatttgcatgttgcatgaaataatatgcacctaaaacatcgctaatctcattgtttgttccctggagtatgagagtcggggtgttaatcttggaaattatttttctaaccttgttggtagccttcaagacctgactagcaaatccagccttaattttttcatgattgattaatgggtcgtattggtatttataaactttatccatatctctagatactgattctggacatagctttccgactggcgcatttggtgtgatggttcccataagtttggcagctagcagattcagtcttgaaacagcatctgcattaactagaggagacattagaatcattgctgtaaacaagtttggattatcgtaagaggctagtatagaaattgttgctcccatggaatgacccaataagtagatttaatagttaccacgtgctgtaccaaagtcatcaatcatcattttttcaccattacttcttccatgtccaatatgatcatgtgagaatactaaaattcctaacgatgatatgttttcagctagttcgtcataacgtccagaatgtttaccagctccatgacttatgaatactaatgccttaggatatgtaatcattgtccagattgaacatacagtttgcactcatgattcacgttatataactatcaatattaacagttcgtttgatgatcatattatttttatgttttattgataattgtaaaaacatacaattaaatcaatatagaggaaggagacggctactgtcttttgtgagatagtcatggcgactaaattagattatgaggatgctgttttttactttgtggatgatgataaaatatgtagtcgcgactccatcatcgatctaatagatgaatatattacgtggagaaatcatgttatagtgtttaacaaagatattaccagttgtggaagactgtacaaggaattgatgaagttcgatgatgtcgctatacggtactatggtattgataaaattaatgagattgtcgaagctatgagcgaaggagaccactacatcaattttacaaaagtccatgatcaggaaagtttattcgctaccataggaatatgtgctaaaatcactgaacattggggatacaaaaagatttcagaatctagattccaatcattgggaaacattacagatctgatgaccgacgataatataaacatcttgatactttttctagaaaaaaaattgaattgatgatataggggtcttcataacgcataattattacgttagcattctatatccgtgttaaaaaaaattatcctatcatgtatttgagagttttatatgtagcaaacatgatagctgtgatgccaataagctttagatattcacgcgtgctagtgttagggatggtattatctggtggtgaaatgtccgttatataatctacaaaacaatcatcgcatatagtatgcgatagtagagtaaacatttttatagtttttactggattcatacatcgtctacccaattcggttatgaatgaaattgtcgccaatcttacacccaaccccttgttatccattagtatagtattaacttcgttatttatgtcataaactgtaaatgattttgtagatgccatatcatacatgatattcatgtccctattataatcattactaactttatcacaatatatgttgataatatctatatatgatctagtctttgtgggcaactgtctatacaagtcgtctaaacgttgtttactcatatagtatcgaacagccatcattacatggtcccgttccgttgatagataatcgagtatgttagtggacttgtcaaatctatataccatattttctggaagtggatatacatagtcgtgatcaacattattgctagcctcatcttctatatcctgtactataccatctacataatctacgatattattacacataaacatcgacaacatactattgtttattatctaagtcctgttgatccaaacccttgatctcctctatttgtactatctagagattgtacttcttccagttctggataatatatacgttgatagattagctgagctattctatctccagtatttacattaaacgtacattttccattattaataagaatgactcctatgtttcccctataatcttcgtctattacaccacctcctatatcaatgccttttagtgacagaccagacctaggagctattctaccatagcaaatcttaggcatggacatactaatatctgtcttaattaactgtctttctcctggagggatagtataatcgtaagcgctatacaaatcatatccggcagcacccggcgattgcctagtaggagatttagctctgttagtttccttaacaaatctaactggtgagttaatattcatgttgaacataaaactaatattttatttcaaaattatttaccatcccatatattccatgaataagtgtgatgattgtacacttctatagtatctatatacgattcacgataaaatcctcctatcaatagcagtttattatccactatgatcaattctggattatccctcggataaataggatcatctatcagagtccatgtattgctggattcacaataaaattccgcatttctaccaaccaagaataaccttctaccgaacactaacgcgcatgatttataatgaggataataagtggatggtccaaactgccactgatcatgattgggtagcaaatattctgtagttgtatcagtttcagaatgtcctcccattacgtatataacattgtttatggatgccactgctggattacatctaggtttcagaagactcggcatattaacccaagcagcatccccgtggaaccaacgctcaacagatgtgggatttggtagacctcctactacgtataatttattgttagcgggtatcccgctagcatacagtctggggctattcatcggaggaattggaatccaattgtttgatatataatttacagctatagcattgttatgtatttcattgttcatccatccaccgatgagatatactacttctccaacatgagtacttgtacacatatggaatatatctataatttgatccatgttcataggatactctatgaatggatacttgtatgatttgcgtggttgtttatcacaatgaaatattttggtacagtctagtatccattttacattatttatacctctgggagaaagataatttgacctgattacatttttgataaggagtagcagatttcctaatttatttcttcgctttatataccacttaatgacaaaatcctcatctggaacatttagttcatcgctttctagaataagtttcatagatagataatcaaaattgtctatgatgtcatcttccagttccaaaaagtgtttggcaataaagtttttagtatgacataagagattggatagtccgtattctatacccatcatgtaacactcgacacaatattcctttctaaaatctcgtaggataaagtttatacaagtgtagatgataaattctacagaggttaatatagaagcacgtaataaattgacgacgttatgactatctatatatacctttccagtatatgagtaaataactatagaagttagactgtgaatgtcaaggtctagacaaaccctcgtaactggatctttatttttcgtgtatttttgacgtaaatgtgtgcgaaagtaaggagataactttttcaatatcgtagaattgactattatattgcctcctatggcatcaataattgttttgaatttcttagtcatagacaatgctaatatattcttacagtacacagtattgacaaatatcggcatttatgtttctttaaaagtcaacatctaaagaaaaatgattatcttcttgagacataactcccattttttggtattcacccacacgtttttcgaaaaaattagttttaccttctaatgatatattttccatgaaatcaaacggattggtaacattataaatttttttaaatcccaattcagaaatcaatctatccgcgacgaattctatatatgttttcatcatttcacaattcattcctataagtttaactggaagagccgcagtaagaaattcttgttcaatggataccgcatctgttataatagatctaacggtttcttcactcggtggatgcaataaatgtttaaacatcaaacatgcgaagtcgcagtgtagaccctcgtctctactaatcaattcgttggaaaacgtgagtccgggcattaggccacgctttttaagccaaaatatggaagcgaatgatccggaaaagaagattccttctactgcagcaaaggcaataagtctctctccataaccggcgctgtcatgtatccacttttgagcccaatcggccttcttttttacacaaggcatcgtttctatggcattaaagagatagtttttttcattactatctttaacataagtatcgatcaaaagactatacatttccgaatgaatgttttcaatggccatctgaaatccgtagaaacatctagcctcggtaatctgtacttctgtacaaaatcgttccgccaaattttcattcactattccgtcactggctgcaaaaaacgccaatacatgttttataaaatatttttcgtctggtgttagtttattccaatcattgatatctttagatatatctacttcttccactgtccaaaatgatgcctctgcctttttatacatgttccagatgtcatgatattggattgggaaaataacaaatctatttggatttggtgcaaggatgggttccataactaaattaacaataacaataaattttttttcagttatctatatgcctgtacttggatcttttgtacatcgatatcgccgcaatcactacaataattacaagtattattgatagcattgttattagtactatcataattaaattatcgttattatcattttgtaattgtgacatcatactagataaatcgtttgcgagattgttgtgggaagcgggcatggaggatgaattatcgttattattatttaaagcctcccattcggattcacaaatatggcgcgcgttcaacattttatggaaacagataacaagaaaactcgtcatcgttcaaatttttaacgatagtaaaccgattaaacgtcgagctaatttctaacgctagcgactctgttggatatgggtttccagatatatatcttttcagttcccctacgtatctataatcatctgtaggaaatggaagatatttccatttatctactgttcctaatatcatatgtggtggtgtagtagaaccattaagcgcgaaagatgttatttcgcatcgtattttaacttcgcaataatttctggttagataacgcactctaccagtcaagtcaatgatattagcctttacagatatattcatagtagtcgtaacgatgactccatcttttagatgcgatactcctttgtatgtaccagaatcttcgtacctcaaactcgatatatttaaacaagttaatgagatattaacgcgttttatgaatgatgatatataaccagaagttttatcctcggtggctagcgctataaccttatcattataataccaactagtgtgattaatatgtgacacgttagtgtgggtacaaatatgtacattatcgtctacgtcgtattcgatacatccgcatacagccaacaaatataaaatgacaaatactctaacgccgttcgtacccatcttgatgcggtttaataaatgttttgatttcaatttattgtaaaaaaagattcggttttatactgttcgatattctcattgcttatattttcatctatcatctccacacagtcaaatccgtggttagcatgcacctcatcaaccggtaaaagactatcggactcttctatcattataactctagaatatttaatttggtcattattaatcaagtcaattatcttatttttaacaaacgtgagtattttactcattttttataaaaacttttagaaatatacagactctatcgtgtgtctatatcttctttttatatccaatgtatttatgtctgatttttcttcatttatcatatataatggtccaaattctacacgtgcttcggattcatccagatcattaaggttcttataattgtaacatccttctcttccctcttctacatcttccttcttattcttattcttagcgtcacagaatctaccacagcaggatcccatgacgagcgtcatattaaactaatccattttcaattataatatacgattagtaatgaccattaaaataaaaatattcttcataaccggcaagaaagtgaaaagttcacattgaaactatgtcagtagtatacatcatgaaatgatgatatatatatactctattttggtggaggattatatgatataattcgtggataatcattcttaagacacatttcttcattcgtaaatcttttcacgttaaatgagtgtccatattttgcaatttcttcatatgatggcggtgtacgtggacgaggctgctcctgttcttgttgtagtcgccgactgtcgtgtctgcgtttagatccctccattatcgcgattgcgtagatggagtactattttataccttgtaattaaatttttttattaattaaacgtataaaaacgttccgtatctgtatttaagagccagatttcgtctaatagaacaaatagctacagtaaaaataactagaataattgctacacccactagaaaccacggatcgtaatacggcaatcggttttcgataataggtggaacgtatattttatttaaggacttaacaattgtctgtaaaccacaatttgcttccgcggatcctgtattaactatctgtaaaagcatatgttgaccgggcggagccgaacattctccgatatccaatttctgtatatctataatattattaacctccgcatacgcattacagttcttttctagcttggataccgcactaggtacatcgtctagatctattcctatttcctcagcgatagctcttctatccttttccggaagcaatgaaatcacttcaataaatgattcaaccatgagtgtgaaactaagtcgagaattactcatgcatttgttagttattcggagcgcgcaatttttaaactgtcctataacctctcctatatgaatagcacaagtgacattagtagggatagaatgttgagctaatttttgtaaataactatctataaaaagattatacaaagttttaaactctttagtttccgccatttatccagtctgagaaaatgtctctcataataaatttttccaagaaactaattgggtgaagaatggaaacctttaatctatatttatcacagtctgttttggtacacatgatgaattcttccaatgccgtactaaattcgatatctttttcgatttctggatatgtttttaataaagtatgaacaaagaaatggaaatcgtaataccagttatgtttaactttgaaattgttttttattttcttgttaatgattccagccacttgggaaaagtcaaagtcgtttaatgccgatttaatacgttcattaaaaacaaactttttatcctttagatgaattattattggttcattggaatcaaaaagtaagatattatcgggtttaagatctgcgtgtaaaaagttgtcgcagcatggtagttcgtaaattttaatgtataacagagccatctgtaaaaagataaactttatgtattgtaccaaagatttaaatcctaatttgatagctagctcggtatctactttatctgccgaatacagtgctaggggaaaaattataatatttcctctttcgtattcgtagttagttctcttttcatgttcgaaaaagtgaaacatgcggttaaaatagtttataacattaatattactgttaataactgccggataaaagtgggatagtaatttcacgaatttgatactgtcctttctctcgttaaacgcctttaaaaaaactttagaagaatatctcaatgatagttcctgaccatccatagtttgtatcaataatagcaacatatgaagaacacgtttatacagagtatgtaaaaatgttaatttatagtttaatcccatggcccacgcacacacgattaattttttttcatctccctttagattgttgtatagaaatttgggtactgtgaactccgccgtagtttccatgggactatataattttgtggcctcgaatacaaattttactacatagttatctatcttaaagactataccatatcctcctgtagatatgtgataaaaatcgtcgtttataggataaaatcgtttatccttttgttggaaaaaggatgaattaatgtaatcattctcttctatctttagtagtgtttccttattaaaattcttaaaataatttaacaatctaactgatggagcccaattttggtgtaaatctaattgggacattatattgttaaaatacaaacagtctcctaatataacagtatctgataatctatggggagacatccattgatattcaggggatgaatcattggcaacacccatttattgtacaaaaagccccaatttacaaacgaaagtccaggtttgatagagacaaactattaactattttgtctctgtttttaatttctttggtaatgaaattattcacaatatcagtatcttctttatctaccagagattttactaacttgataaccttggctgtctcattcaatagggtagtaatatttgtatgtgtgatattgatatcttttagaagtgattctttgatggtgccagcatacgaattacaataatgcagaaactcggttaacatgcaggaattatagtaagccaattccaattgttgcctgtgttgtattagagtgtcaatatgagcaatggtgtccttgcgtttctctgatagaatgcgagcagcgattttggcgttatcatttgacgatatttctggaatgacgaatcctgtttctactaactttttggtaggacaaagtgaaacaatcaagaagatagcttctcctcctatttgtggaagaaattgaactcctctagatgatctccttgacagatattggaccgaattacagaagtacctggaatgtaaagccctgaaaccccctcattttttaagcagattgttgccgtaaatcctgcactatgcccaagatagagagctcctttggtgaatccatctctatgtttcagtttaaccaagaaacagtcagctggtctaaaatttccatctctatctaatacagcatctaacttgatgtcaggaactatgaccggttatgttatatgtaacattgagtaaatccttaagttcataatcatcactgtcatcagttatgtacgatccaaacaatgtttctactggcatagtggatacgaagatgctatccatcagaatgtttccctgattagtattttctatatagctattcttctttaaacgattttccaaatcagtaactatgttcatttttttaggagtaggacgcctagccagtatggaagaggattttctagatcctctcttcaacatctttgatctcaatggaatgcaaaaccccatagtgtaacaaccaacgataaaaataatattgtttttcactttttataattttaccatctgactcatggattcattaatatctttataagagctactaacgtataattctttataactgaactgagatatatacaccggatctatggtttccataattgagtaaatgaatgctcggcaataactaatggcaaatgtataaaacaacgaaattatactagagttgttaaagttaatattttctatgagctgttccaataaattatttgttgtaactgcgttcaagtcataaatcatcttgatactatccagtaaaccgtttttaagttctggaatattattatcccattgtaaagcccctaattcgactatcgaatatcctgctctgatagcagtttcaatatcgacggacgtcaatactgtaataaaggtggtagtattgtcatcatcgtgataaactactggaatatggtcgttagtaggtacggtaactttacacaacgcgatatataactttccttttgtaccatttttaacgtagttgggacgtcctgcagggtattgttttgaagaaatgatatcgagaacagatttgatacgatatttgttggattcctgattatttactataatataatctagacagatagatgattcgataaatagagaaggtatatcgttggtaggataatacatccccattccagtattctcggatactctattaatgacactagttaagaacatgtcttctattctagaaaacgaaaacatcctacatggactcattaaaacttctaacgctcctgattgtgtctcgaatgcctcgtacaaggatttcaaggatgccatagattctttgaccaacgatttagaattgcgtttagcatctgatttttttattaaatcgaatggtcggctctctggtttgctaccccaatgataacaatagtcttgtaaagataaaccgcaagaaaatttatacgcatccatccaaataaccctagcaccatcggatgatattaatgtattattatagattttccatccacagttattgggccagtatactgttagcaacggtatatcgaatagattactcatgtaacctactagaatgatagttcgtgtactagtcataatatctttaatccaatctaagaaatttaaaattagattttttacactgttaaagttaacaaaggtattacccggatacgtggatatcatatatggtattggtccattatcagtaatagctccataaactgatacggcgatggtttttatatgtgtttgatctaacgaggaagaaattcgcgcccacaattcatctctagatatgtatttaatatcaaacggtaacacatcaatttcgggacgcgtatatgtttctaaatttttaatccaaatataatgatgacctatatgccctattatcatactgtcaactatagtacacctagagaacttacgatacatctgtttcctataatcgttaaattttacaaatctataacatgctaaaccttttgacgacaaccattcattaatttctgatatggaatctgtattctcaataccgtatcgttctaaagccagtgctatatctccctgttcgtgagaacgctttcgtataatatcgatcaacggataatctgaagtttttggagaataatatgactcatgatctatttcgtccataaacaatctagacataggaattggaggcgatgatcttaattttgtgcaatgagtcgtcaatcctataacttctaatattgtaatattcatcatcgacataacactatctatgttatcatcgtatattagtataccatgaccttcttcatttcgtgccaaaatgatatacagtcttaaatagttacgcaatatctcaatagtttcataattgttagctgttttcatcaaggtttgtatcctgtttaacatgatggcgttctatacgtttctattttttaaatttttaacgatttactgtggctagatacccaatctctctcaaatatttttttagcctcgcttacaagctgtttatctatactattaaaactgacgaatccgtgattttggtaatgggttccgtcgaaatttgccgaagtgatatgaacatattcgtcgtcgactatcaacaattttgtattattctgaatagtgaaaaccttcacagatagatcattttgaacacacaacgcgtctagacttctggcggttgccatagaatatacgtcgttcttatcccaattaccaactagaagtctgatcttaactcctctattaatggctgcttctataatggagttgtaaatgtcgggccaatagtagctattaccgtcgacacgtgtagtgggaactatggccaaatgttcaatatctatactagtcttagccgacttgagtttatcaataactacatcagtgtctagatctctagaatatcccaataggtgttccggagaatcagtaaagaacactccacctataggattcttaatatgatacgcagtgctaactggcagacaacaagccgcagagcataaattcaaccatgaattttttgcgctattaaaggctttaaaagtatcaaatcttctacgaagatctgtggccagcgggggataatcagaatatacacctaacgttttaatcgtatgtatagatcctccagtaaatgacgcgtttcctacataacatctttcattatctgacacccaaaaacaaccgagtagtagtcccacattattttttttatctatattaacggttataaaatttatatccgggcagtgactttgtagctctcccagatttcttttccctcgttcatctagcaaaactattattttaatccctttttcagatgcctcttttagtttatcaaaaataagcgctcccctagtcgtactcagaggattacaacaaaaagatgctatgtatatatatttcttagctagagtgataatttcgttaaaacattcaaatgttgttaaatgatcggatctaaaatccatattttctggtagtgtttctaccagcctacattttgctcccgcaggtaccggtgcaaatggccacatttagttaacataaaaacttatacatcctgttctatcaacgattctagaatatcatcggctatatcgctaaaattttcatcaaagtcgacatcacaacctaactcagtcaatatattaagaagttccatgatgtcatcttcgtctatttctatatccgtatccattgtagattgttgaccgattatcgagtttaaatcattactaatactcaatccttcagaatacaatctgtgtttcattgtaaatttataggcggtgtatttaagttggtagattttcaattatgtatcaatatagcaacagtagttcttgctcctccttgattctagcatcctcttcattattttcttctacgtacataaacatgtccaatacgttagacaacacaccgacgatggcggccgccacagacacgaatatgactaaaccgatgaccatttaaaaacccctctctagctttcacttaaactgtatcgattattcttttagaacatgtataatataaaaacattattctatttcgaatttaggcttccaaaaatttttcatccgtaaaccgataataatatatatagacttgttaatagtcggaataaatagattaatgcttaaactatcatcatctccacgattagagatacaatatttacattttttttgctgtttcgaaactttatcaatacacgttaatacaaacccaggaaggagatattgaaactgaggctgttgaaaatgaaacggtgaatacaataattcagataatgtaaaatcatgattccgtattctgatgatattagaactgctaatggatgtcgatggtatgtatctaggagtatctattttaacaaagcatcgatttgctaatatacaattatcattttgattaattgttattttattcatattcttaaaaggtttcatatttatcaattcttctacattaaaaatttccatttttaatttatgtagccccgcaatactcctcattacgtttcattttttgtctataatatccattttgttcatctcggtacatagattatccaattgagaagcgcatttagtagttttgtacattttaagtttattgacgaatcgtcgaaaactagttatagttaacattttattatttgataccctgatattaatacccctgccgttactattatttataactgatgtaatccacgtaacattggaattaactatcgatagtaatgcatcgacgcttccaaaattgtctattataaactcaccgataatttttttattacatgttttcatattcattaggattattaaatctttaatcttactacgattgtatgcgttgatattgcaagacgtcattctaaaagacggaggatctccatcaaatgccagacaatcacgtacaaagtacatggaaataggttttgttctattgcgcatcatagatttatatagaacacccgtagaaatactaatttgttttactctataaaatactaatgcatctatttcatcgttttgtataacgtctttccaagtgtcaaattccaaatttttttcattgatagtaccaaattcttctatctctttaactacttgcatagataggtaattacagtgatgcctacatgccgttttttgaaactgaatagatgcgtctagaagcgatgctacgctagtcacaatcaccactttcatatttagaatatatatatgtaaaaatatagtagaatttcattttgttttttttctatgctataaatgaattctcattttgcatctgctcatactccgttttatatcaataccaaagaaggaagatatctggttctaaaagccgttaaagtatgcgatgttagaactgtagaatgcgaaggaagtaaagcttcctgcgtactcaaagtagataaaccctcatcacccgcgtgtgagagaagaccttcgtccccttccagatgcgagagaatgaataacccaggaaaacaagttccgtttatgaggacggacatgctacaaaatatgttcgcggctaatcgcgataatgtagcttctagacttttgtcctaaaatacaattatatccttttcgatattaataaatccgtgtcgtccaggttttttatctctttcagtatgtgaatagataggtattttatctctattcatcatcgaatttaagagatccgataaacattgtttgtattctccagatgtcagcatctgatacaacaatatatgtgcacataaacctctggcacttatttcatgtaccttccccttatcactaaggagaatagtatttgagaaatatgtatacatgatattatcatgaattagatatacagaatttgtaacactctcgaaatcacacgatgtgtcggcgttaagatctaatatatcactcgataacacattttcatctagatacactagacattttttaaagctaaaatagtctttagtagtaacagtaactatgcgattattttcatcgatgatacatttcatcggcatattattacgcttaccatcaaagactataccatgtgtatatctaacgtattctagcatggttgccatacgcgcattaaacttttcaggatctttggatagatcttccaatctatctatttgagaaaacatttttatcatgttcaatagttgaaacgtcggatccactatatagatattatctataaagattttaggaactacgttcatggtatcctggcgaatattaaaactatcaatgatatgattatcgttttcatcttttatcaccatatagtttctaagatatgggattttacttaatataatattatttcccgtaataaattttattagaaatgccaaatctataagaaaagtcctcgaattagtttgaagaatatctatatcgccgtaccgtatatttggattaattagatatagagaatatgatccgtaacatatacaacttttattatggcgtctaagatattcttccatcaacttattaacatttttgactagggaagatacattatgacgtcccattacttttgccttgtctattactgcgacgttcatagaatttagcatatctcttgccaattcttccattgatgttacattataagaaattttagatgaaattacatttggagctttaatagtaagaactcctaatatgtccgtgtatgtggtcactaatacagattgtagttctataatcgtaaataatttacctatattatatgtttgagtctgtttagaaaagtagctaagtatacgatcttttatttctgatgcagatgtatcaacatcggaaaaaaatctttttttattcttttttactaaagatacaaatatgtctttgttaaaaacagttattttctgaatatttctagcttgtaattttaacatatgatattcgttcacactaggtactctgcctaaataggtttctataatctttaatgtaatattaggaaaagtattctgatcaggattcctattcattttgaggatttaaaactctgattattgtctaatatggtctcaacacaaactttttcacagagcgatagagtttttgataactcgtttttcttaagaaatataaaactactgtctccagagctcgctctatcttttattttatttaattcgatacaaactcctgatactggttcagaaagtaattcattaattttcagtcctttatagaagatatttaatatagataatacaaaatcttcagtttttgatatcgatctgattgatcctagaactagatatattaataacgtgctcattaggcagtttatggcagcttgataattagatatagtatattccagttcatatttattagataccgcattgcccagattttgatattctatgaattcctctgaaaataaatccaaaataactagacattctattttttgtggattagtgtactctcttccctctatcatgttcactactggtgtccacgatgataaatatctagagggaatataatatagtccataggatgccaatctagcaatgtcgaataactgtaattttattcttcgctcttcattatgaattgattcttgaggtataaacctaacacaaattatattattagacttttcgtatgtaatgtctttcatgttataagtttttaatcctggaatagaatctattttaatgaggcttttaaacgcagagttctccaacgagtcaaagcataatactctgttggttttcttatatacgatgttacgattttcttctttgaatggaataggtttttgaattagtttataattacaacataatagataaggaagtgtgcaaatagtacgcggaaaaaacataatagctcccctgttttcatccatggttttaagtaaatgatcactggcttctttagtcaatggatattcgaacattaaccgtttcatcatcattggacagaatccatatttcttaatgtaaagagtgatcaaatcattgtgtttattgtaccatcttgttgtaaatgtgtattcggttatcggatctgctcctttttctattaaagtatcgatgtcgatctcgtctaagaattcaactatatcgacatatttcatttgtatacacataaccattactaacgtagaatgtataggaagagatgtaacgggaacagggtttgttgattcgcaaactattctaatacataattcttctgttaatacgtcttgcacgtaatctattatagatgccaagatatctatataattattttgtaagatgatgttaactatgtgatctatataagtagtgtaataattcatgtatttcgatatatgttccaactctgtctttgtgatgtctagtttcgtaatatctatagcatcctcaaaaaatatattcgcatatattcccaagtcttcagttctatcttctaaaaaatcttcaacgtatggaatataataatctattttacctcttctgatatcattaatgatatagtttttgacactatcttctgtcaattgattcttattcactatatctaagaaacggatagcgtccctaggacgaactactgccattaatatctctattatagcttctggacataattcatctattataccagaattaatgggaactattccgtatctatctaacatagttttaagaaagtcagaatctaagacctgatgttcatatattggttcatacatgaaatgatctctattgatgatagtgactatttcattctctgaaaattggtaactcattctatatatgctttccttgttgatgaaggatagaatatactcaatagaatttgtaccaacaaactgttctcttatgaatcgtatatcatcatctgaaataatcatgtaaggcatacatttaacaattagagacttgtctcctgttatcaatatactattcttgtgataatttatgtgtgaggcaaatttgtccacgttctttaattttgttatagtagatatcaaatccaatggagctacagttcttggcttaaacagatatagtttttctggaacgaattctacaacattattataaaggactttgggtagataagtgggatgaaatcctattttaattaatgcgatagccttgtcctcgtgcagatatccaaacgcttttgtgatagtatggcattcattgtctagaaacgctctacgaatatctgtgacagatatcatctttagagaatatactagtcgcgttaatagtactacaatttgtattttttaatctatctcaataaaaaaattaatatgtatgattcaatgtataactaaactactaactgttattgataactagaatcagaatctaatgatgacgtaaccaagaagtttatctactgccaatttagctgcattatttttagcatctcgtttagattttccatctgccttatcgaatactcttccgtcgatatctacacaggcataaaatgtaggagagttactaggccccactgattcaatacgaaaagaccaatctctcttagttatttggcagtactcattaataatggtgacagggttagcatctttccaatcaataatttttttagccggaataacatcatcaaaagacttatgatcctctctcattgatttttcgcgggatacatcatctattatggcgtcagccataacatcagcatccggcttatccgcctccgttgtcataaaccaacgaggaggaatatcgtcggagctgtacaccatagcactacgttgaagatcgtacagagctttattaacttctcgcttctccatattaagttgtctagttagttgtgcagcagtagctccttcgattccaatgtttttaatagccgcacacacaatctctgcgtcagaacgctcgtcaatatagatcttagacatttttagagagaactaacacaaccagcaataaaactaatttattttatcatttttttattcatcatcctctggtggttcgtcgtttctatcgaatgtggatctgattaacccgtcatctataggtgatgctggttctggagattctggaggagatggattattatctggaagaatctctgttatttccttgttttcatgtatcgattgcgttgtaacattaagattgcgaaatgctctaaatttgggaggcttaaagtgttgtttgcaatctctacacgcatgtctaactagtggaggttcgtcagcggctctagtttgaatcatcatcggcgtagtattcctacttttacagttaggacacggtgtattgtatttctcgtcgagaacgttaaaataatcgttgtaactcacatcctttattttatctatattgtattctactcctttcttaatgcattttataccgaataagagatagcgaaggaattctttttcggtgccgctagtacccttaatcatatcacatagtgttttatattccaaatttgtggcaatagacggtttatttctatacgatagtttgtttctggaatcctttgagtattctataccaatattattctttgattcgaatttagtttcttcgatattagattttgtattacctatattcttgatgtagtactttgatgatttttccatggcccattctattaagtcttccaagttggcatcatccacatattgtgatagtaattctcggatatcagtagcggctaccgccattgatgtttgttcattggatgagtaactactaatgtatacattttccatttataacacttatgtattaactttgttcatttatattttttcattattatgttgatattaacaaaagtgaatatatatgttaataattgtattgtggttatacggctacaatttcataatgagtggaagtcagtgtccgatgatcaatgacgatagctttactctgaaaagaaagtatcaaatcgatagtgcggagtcaacaataaaaatggataagaagaggataaagtttcagaatagagccaaaatggtaaaagaaataaatcagacaataagagcagcacaaactcattacgagacattgaaactaggatacataaaatttaagagaatgattaggactactactctagaagatatagcaccatctattccaaataatcagaaaacttataaactattctcggacatttcagccatcggcaaagcatcacagaatccgagtaagatggtatatgctctgctgctttacatgtttcccaatttgtttggagatgatcatagattcattcgttatagaatgcatccaatgagtaaaatcaaacacaagatcttctctcctttcaaacttaatcttattagaatattagtggaagaaagattctataataatgaatgcagatctaataaatggagaataattggaacacaagttgataaaatgttgatagctgaatctgataaatatacaatagatgcaaggtataacctaaaacccatgtatagaatcaagggaaaatctgaagaagataccctctttatcaaacagatggtagaacaatgtgtgacatcccaggaattggtggaaaaagtgttgaagatactgtttagagatttgttcaagagtggagaatacaaagcgtacagatacgatgatgatgtagaaaatggatttattggattggatacactaaaattaaacattgttcatgatatagttgaaccatgtatgcctgttcgtaggccagtggctaagatactgtgtaaagaaatggtaaataaatactttgagaatccgctacatattattggtaaaaatcttcaagagtgcattgactttgttagtgaataggcatttcatctttctccaatactaattcaaattgttaaattaataatggatagtataaatagttattagtgataaaatagtaaaaataattattagaataagagtgtagtatcatagataactctcttctataaaaatggattttattcgtagaaagtatcttatatacacagtagaaaataatatagattttttaaaggatgatacattaagtaaagtaaacaattttaccctcaatcatgtactagctctcaagtatctagttagcaattttcctcaacacgttattactaaggatgtattagctaataccaatttttttgttttcatacatatggtacgatgttgtaaagtgtacgaagcggttttacgacacgcatttgatgcacccacgttgtacgttaaagcattgactaagaattatttatcgtttagtaacgcaatacaatcgtacaaggaaaccgtgcataaactaacacaagatgaaaaatttttagaggttgccgaatacatggacgaattaggagaacttataggcgtaaattatgacttagttcttaatccattatttcacggaggggaacccatcaaagatatggaaatcatttttttaaaactgtttaagaaaacagacttcaaagttgttaaaaaattaagtgttataagattacttatttgggcttacctaagcaagaaagatacaggcatagagtttgcggataatgatagacaagatatatacactctatttcaacaaactggtagaatagtccatagcaatctaacagaaacgtttagagattatatctttcccggagataagactagctattgggtgtggttaaacgaaagtatagctaatgatgcggatattgttcttaatagacacgccattaccatgtatgataaaattcttagttatatatactctgagataaaacaaggacgcgttaataaaaacatgcttaagttagtttatatctttgagcctgaaaaagatatcagagaacttctgctagaaatcatatatgatattcctggagatatcctatctattattgatgcaaaaaacgacgattggaaaaaatattttattagtttttataaagctaattttattaacggtaatacatttattagtgatagaacgtttaacgaggacttattcagagttgttgttcaaatagatcccgaatatttcgataatgaacgaattatgtctttattctctacgagtgctgcggacattaaacgatttgatgagttagatattaataacagttatatatctaatataatttatgaggtgaacgatatcacattagatacaatggatgatatgaagaagtgtcaaatctttaacgaggatacgtcgtattatgttaaggaatacaatacatacctgtttttgcacgagtcggatcccatggtcatagagaacggaatactaaagaaactgtcatctataaaatccaagagtagacggctgaacttgtttagcaaaaacattttaaaatattatttagacggacaattggctcgtctaggtcttgtgttagatgattataaaggagacttgttagttaaaatgataaaccatcttaagtctgtggaggatgtatccgcattcgttcgattttctacagataaaaaccctagtattcttccatcgctaatcaaaactattttagctagttataatatttccatcatcgtcttatttcaaaggtttttgagagataatctatatcatgtagaagaattcttggataaaagcatccatctaaccaagacggataagaaatatatacttcaattgataagacacggtagatcatagaacagaccaaatatattattaataatttgtatatacatagatataattatcacacatttttgataaatgggaactgctgcaacaattcagactcccaccaaattaatgaataaagaaaatgcagaaatgattttggaaaaaattgttgatcatatagttatgtatattagtgacgaatcaagtgattcagaaaataatcctgaatatattgattttcgtaacagatacgaagactatagatctctcattataaaaagtgatcacgagtttgtaaagctatgtaaaaatcatgcagagaaaagttctccagaaacgcaacaaatgattatcaaacacatatacgaacaatatcttattccagtatctgaagtactattaaaacctataatgtccatgggtgacataattacatataacggatgtaaagacaatgaatggatgctagaacaactctctaccctaaactttaacaatctccgcacatggaactcatgtagcataggcaatgtaacgcgtctgttttatacattttttagttatctgatgaaagataaactaaatatataagtataatcccattctaatactttaacctgatgtattacctgcatcttattagaatattaacctaactaaaagacataacatagttgataaaaagcggtaggatataaatattatggctgccaccgttccgcgttttgacgacgtgtacaaaaatgcacaaagaagaattctagatcaagaaacattttttagtagaggtctaagtagaccgttaatgaaaaacacatatctatttgataattacgcgtatggatggataccagaaactgcaatttggagtagtagatacgcaaacttagatgcaagtgactattatcccatttcgttgggattacttaaaaagttcgagtttctcatgtctctatataaaggtcctattcccgtatatgaagaaaaagtaaatactgaattcattgctaatggatcgttctctggtagatacgtatcatatcttcgaaagttttctgcccttccaacaaacgagtttattagttttttgttactgacttccattccaatctataatatcttgttctggtttaaaaatactcagtttgatattactaaacacacattattcagatacgtctatacagataatgccaaacacctggcgttggctaggtatatgcatcaaacaggagactataagcctttgtttagtcgtctcaaagagaattatatatttaccggtcccgttccaataagtatcaaagatatagatcaccctaatcttagtagagcaagaagtccatccgattatgagacattagctaatattagtactatattgtactttaccaagtatgatccggtattaatgtttttattgttttacgtacctgggtattcaattactacaaaaattactccagccgtagaatatctaatggataaactgaatctaacaaagagcgacgtacaactgttgtaaattattttatgcttcgtaaaatgtaggttttgaaccaaacattctttcaaagaatgagatgcataaaactttattatccaatagattgactatttcggacgtcaatcgtttaaagtaaacttcgtaaaatattctttgatcactgccgagtttaaaacttctatcgataattgtttcatatgttttaatatttacaagttttttggtccatggtacattagccggacaaatatatgcaaaataatatcgttctccaagttctatagtttctggattatttttattatattcagtaaccaaatacatattagggttatctgcggatttataatttgagtgatgcattcgactcaacataaataattctagaggagacgatctactatcaaattcggatcgtaaatctgtttctaaagaacggagaatatctatacatacctgattagaattcatccgtccttcagacaacatctcagacagtctggtcttgtatgtcttaatcatattcttatgaaacttggaaacatctcttctagtttcactagtacctttattaattctctcaggtacagattttgaattcgacgatgctgagtatttcatcgttgtatatttcttcttcgattgcataatcagattcttatataccgcctcaaactctattttaaaattattaaacaatactctattattaatcagtcgttctaactctttcgctatttctatagacttatcgacatcttgactgtctatctctgtaaacacggagtcggtatctccatacacgctacgaaaacgaaatctgtaatctataggcaacgatgttttcacaatcggattaatatctctatcgtccatataaaatggattacttaatggattggcaaaccgtaacataccgttagataactctgctccatttagtaccgattctagatacaagatcattctacgtcctatggatgtgcaactcttagccgaagcgtatgagtatagagcactatttctaaatcccatcagaccatatactgagttggctactatcttgtacgtatattgcatggaatcatagatggccttttcagttgaactggtagcctgttttagcatctttttatatctggctctctctgccaaaaatgttcttaatagtctaggaatggttccttctatcgatctatcgaaaattgctatttcagagatgaggttcggtagtctaggttcacaatgaaccgtaatatatctaggaggtggatatttctgaagcaagagctgattatttatttcttcttccaatctattggtactaacaacgacaccgactaatgtttccggagatagatttccaaagatacacacattaggatacagactgttataatcaaagattaatacattattactaaacattttttgttttggagcaaataccttaccgccttcataaggaaacttttgttttgtttctgatctaactaagatagttttagtttccaacaatagctttaacagtggacccttgatgactgtactcgctctatattcgaataccatggattgaggaagcacatatgttgacgcacccgcgtctgtttttgtttctactccataatactcccacaaatactgacacaaacaagcatcatgaatacagtatctagccatatctaaagctatgtttagattataatccttatacatctgagctaaatcaacgtcatcctttccgaaagataatttatatgtatcattaggtaaagtaggacatgatagtacgactttaaatccattttcccaaatatctttacgaattactttacatataatatcctcatcaacagtcacataattacctgtggttaaaacctttgcaaatgcagcggctttgcctttcgcgtccgtagtatcgtcaccgatgaacgtcatttctctaactcctctatttaatactttacccatgcaactgaacgcgttcttggatatagaatccaatttgtacgaatccaatttttcagatttttgaatgaatgaatatagatcgaaaaatatagttccattattgttattaacgtgaaacgtagtattggccatgccgcctactcccttatgactagactgatttctctcataaatacagagatgtacagcttcctttttgtccggagatctaaagataatcttctctcctgttaataactctagacgattagtaatatatctcagatcaaagttatgtccgttaaaggtaacgacgtagtcgaacgttagttccaacaattgtttagctattcgtaacaaaactatttcagaacatagaactagttctcgttcgtaatccatttccattagtgactgtatcctcaaacatcctctatcgacggcttcttgtatttcctgttccgttaacatctcttcattaatgagcgtaaacaataatcgtttaccacttaaatcgatataacagtaacttgtatgcgagattgggttaataaatacagaaggaaacttcttatcgaagtgacactctatatctagaaataagtacgatcttgggatatcgaatctaggtatttttttagcgaaacagttacgtggatcgtcacaatgataacatccattgttaatctttgtcaaatattgctcgtccaacgagtaacatccgtctggagatatcccgttagaaatataaaaccaactaatattgagaaattcatccatggtggcattttgtatgctgcgtttctttggctcttctatcaaccacatatctgcgacggagcattttctatctttaatatctagattataacttattgtctcgtcaatgtctatagttctcatctttcccaacggcctcgcattaaatggaggaggagacaatgactgatatatttcgtccgtaactacgtaataaaagtaatgaggaaatcgtataaatacggtctcgccatttcgacatctggatttcagatataaaaatctgttttcaccgtgactttcaaaccaattaatgcaccgaacatccatttatagaatttagaaatatattttcatttaaatgaatcccaaacattggggaagagccgtatggaccattatttttatagtactttcgcaagcgggtttagacggcaacatagaagcgtgtaaacgaaaactatatactatagtcagcactcttccatgtcctgcatgtagacggcacgcgactatcgctatagaggacaataatgtcatgtctagcgatgatctgaattatatttattattttttcatcagattatttaacaatttggcatctgatcccaaatacgcgatcgatgtgacaaaggttaaccctttataaacttaacccattataaaacttatgattagtcacgactgaaataaccgcgtgattattttttggtataattctacacggcatggtttctgtaactatgaattcaacccccgttacattagtgaaatctttaacaaacagcaagggttcgtcaaagacataaaactcattgtttacaatcgaaatagaccccctatcacacttaaaataaaaaatatccttatcctttaccaccaaataaaattctgattggtcaatgtgaatgtattcacttaacagttccacaaatttatttattaactccgaggcacatacatcgtcggtattttttatggcaaactttactcttccagcatccgtttctaaaaaaatattaacgagttccatttatatcatccaatattattgaaatgacgttgatggacagatgatacaaataagaaggtacggtacctttgtccaccatctcctccaattcatgctctattttgtcattaactttaatgtatgaaaacagtacgccacatgcttccatgacagtgtgtaacactttggatacaaaatgtttgacattagtataattgtccaagactgtcaatctataatagatagtagctataatatattctatgatggtattgaagaagatgacaatcttggcatattgatcatttaacacagacatggtatcaacagatagcttgaatgaaagagaatcagtaattggaataagcgtcttctcgatagagtgtccgtataccaacatgtctgatattttgatgtattccattaaattatttagttttttctttttattctcgttaaacagcatttctgtcaacggaccccaacatcgttgaccgattaagttttgattgatttttccgtgtaaggcgtatctagtcagatcgtatagcctatccaataatccatcatctgtgcgtagatcacatcgtacactttttaattctctatagaagagcgacagacagcaatttctttattctctacagatgtaagatacttgaagacattcctatgatgatgcagaattttggataacacggtattgatggtatctgttaccataattcctttgatggctgatagtgtcagagcacaagatttccaatctttgttttgatatctatatcagacagcatggtgcgtctgacaacacaaggattaagacggaaagatgaaatgattctctcaacatcttcaatggataccttgctattttttctggcattatctatatgtgcgagaatatcctctagagaatcagtatcctttttgatgatagtggatctcaatgacatgggacgtctaaaccttcttattctatcaccagattgcatggtgatttgtcttctttcttttatcataatgtaatctctaaattcatcggcaaattgtctatatctaaaatcataatatgagatgtttacctctacaaatatctgttcgtccaatgttagagtatctacatcagttttgtattccaaattaaacatggcaacggatttaattttatattcctctattaagtcctcgtcgataataacagaatgtagataatcatttaatccatcgtacatggttggaagatgcttgttgacaaaatctttaattgtcttgatgaaggtgggactatatctaacatcttgattaataaaatttataacattgtccataggatactttgtaactagttttatacacatctcttcatcggtaagtttagacagaatatcgtgaacaggtggtatattatattcatcagatatacgaagaacaatgtccaaatctatattgtttaatatattatatagatgtagcgtagctcctacaggaatatctttaactaagtcaatgatttcatcaaccgttagatctattttaaagttaatcatataggcattgatttttaaaaggtatgtagccttgactacattctcattaattaaccattccaagtcactgtgtgtaagaagattatattctatcataagcttgactacatttggtcccgataccattaaagaattcttatgatataaggaaacagattttaggtactcatctactctacaagaattttggagagccttaacgatatcagtgacgtttattatttcaggaggaaagaatctaacattgagaatatcggaattaatagcttccagatacagtgattttggcaatagtccgtgtaatccataatccagtaacacgagctggtgcttgctagacaccttttcaatgtttaatttttttgaaataagctttgataaagccttcctcgcaaattccggatacatgaacatgtcggcgacatgattaagtattgttttttcattattttctcaacaagttctcaataccccaatagatgatagaatatcacccaatgcgtccatgttgtctatttccaacaggtcgctatatccaccaatagaagtttttccaaaaaagattctaggaacagttctaccaccagtaatttgttcaaaatagtcacgcaattcattttcgggtttaaattctttaatatcgacaatttcatacgctcctcttttgaaactaaacttatttagaatatccagtgcatttctacaaaaaggacatgtatacttgacaaaaattgtcactttgttattggccaacctttgttgtacaaattcctcggccattttaatatttaagtgatataaaactatctcgacttatttaactctttagtcgagatatatggacgcagatagctatatgatagccaactacagaaggcaaacgctataaaaaacataattacgacgagcatatttataaatatttttattcagcattacttgatatagtaatattaggcacagtcaaacattcaaccactctcgatacattaactctctcattttctttaacaaattctacaatatcttcgtaaaaagattcttgaaactttttagaatatctatcgactctagatgaaatagcgttcgtcaacatactatgttttgtatacataaaggcgcccattttaacagtttctagtgacaaaatgctagcgatcctaggatcctttagaatcacatagattgacgattcgtctctcttagtaactctagtaaaataatcatacaatctagtacgcgaaataatattatccttgacttgaggagatctaaacaatctagttttgagaacatcgataagttcatcgggaatgacatacatactatctttaatagaactcttttcatccagttgaatggattcgtccttaaccaactgattaatgagatcttctattttatcattttccagatgatatgtatgtccattaaagttaaattgtgtagcgcttctttttagtctagcagccaatactttaacatcactaatatcgatatacaaaggagatgatttatctatggtattaagaattcgtttttcgacatctgtcaaaaccaattcctttttgcctgtatcatccagttttccatcctttgtaaagaaattattttctactagactattaataagactgataaggattcctccataattgcacaatccaaactttttaacaaaactagactttacaagatctacaggaatgcgtaattcaggtttcttagcttgtgattttttcttttgtggacattttcttgtgaccaactcatctaccatttcattgattttagcagtgaaataagctttcaatgcacgggcactgatactattgaaaacgagttgatcttcaaattccgccatttaagttcaccaaacaacttttaaatacaaatatatcaatagtagtagaataagaactataaaaaaaataataattaaccaataccaaccccaacaaccggtattattagttgatgtgactgttttctcatcacttagaacagatttaacaatttctataaagtctgtcaaatcatcttccggagaccccataaatacaccaaatatagcggcgtacaacttatccatttatacattgaatattggcttttctttatcgctatcttcatcatattcatcatcaatatcaacaagtcccagattacgagccagatcttcttctacattttcagtcattgatacacgttcactatctccagagagtccgataacgttagccaccacttctctatcaatgattagtttcttgagtgcgaatgtaatttttgtttccgttccggatctatagaagacgataggtgtgataattgccttggccaattgtctttctcttttactgagtgattctagttcaccttctatagatctgagaatggatgattctccagtcgaaacatattctaccatggatccgtttaatttgttgatgaagatggattcatccttaaatgttttctctgtaatagtttccaccgaaagactatgcaaagaatttggaatgcgttccttgtgcttaatgtttccatagacggcttctagaagttgatacaacataggactagccgcggtaacttttatttttagaaagtatccatcgcttctatcttgtttagatttatttttataaagtttagtctctccttccaacataataaaagtggaagtcatttgactagataaactatcagtaagttttatagagatagacgaacaattagcgtattgagaagcatttagtgtaacgtattcgatacattttgcattagatttactaatcgattttgcatactctataacacccgcacaagtctgtagagaatcgctagatgcagtaggtcttggtgaagtttcaactctcttcttgattaccttactcatgattaaacctaaataattgtactttgtaatataatgatatatattttcactttatctcatttgagaataaaaatgtttttgtttaaccactgcatgatgtacagatttcggaatcgcaaaccaccagtggttttattttatccttgtccaatgtgaattgaatgggagcggatgcgggtttcgtacgtagatagtacattcccgtttttagaccgagactccatccgtaaaaatgcatactcgttagtttggaataactcggatctgctatatggatattcatagattgactttgatcgatgaaggctcccctgtctgcagccatttttatgatcgtcttttgtggaatttcccaaatagttttataaactcgcttaatatcttctggaaggtttgtattctgaatggatccaccatctgccataatcctattcttgatctcatcattccataattttctctcggttaaaactctaaggagatgcggattaactacttgaaattctccagacaatactctccgagtgtaaatattactggtatacggttccaccgactcattatttcccaaaatttgagcagttgatgcagtcggcataggtgccaccaataaactatttctaagaccgtatgttctgattttatcttttagaggttcccaattccaaagatccgacggtacaacattccaaagatcatattgtagaataccgttactggcgtacgatcctacatatgtatcgtatggtccttccttctcagctagttcacaactcgcctctaatgcaccgtaataaatggtttcgaagatcttcttatttagatcttgtgcttccaggctatcaaatggataatttaagagaataaacgcgtccgctaatccttgaacaccaataccgataggtctatgtctcttattagagatttcagcttctggaataggataataattaatatctataattttattgagatttctgacaattactttgaccacatccttcagtttgagaaaatcaaatcgcccatctattacaaacatgttcaaggcaacagatgccagattacaaacggctacctcattagcatccgcatattgtattatctcagtgcaaagattactacacttgatagttcctaaattttgttgattactctttttgttacacgcatccttataaagaatgaatggagtaccagtttcaatctgagattctataatcgctttccagacgactcgagcctttattatagatttgtatctcctttctctttcgtatagtgtatacaatcgttcgaactcgtctccccaaacattgtccaatccaggacattcatccggacacatcaacgaccactctccgtcatccttcactcgtttcataaagagatcaggaatccaaagagctataaatagatctctggttctatgttcctcgtttcctgtattctttttaagatcgaggaacgccataatatcagaatgccacggttccaagtatatggccataactccaggccgtttgtttcctccctgatctatgtatctagcggtgttattataaactctcaacattggaataataccgtttgatataccattggtaccggagatatagcttccactggcacgaatattactaattgatagacctattccccctgccattttagagattaatgcgcatcgttttaacgtgtcatagataccctctatgctatcatcgatcatgttaagtagaaaacagctagacatttggtgacgactagttcccgcattaaataaggtaggagaagcgtgcgtaaaccatttttcagaaagtagattgtacgtctcaatagctgagtctatatcccattgatgaattcctactgcgacacgcattaacatgtgctgaggtctttcaacgatcttgttgtttattttcaacaagtaggatttttccaaagttttaaaaccaaaatagttgtatgaaaagtctcgttcgtaaataataaccgagttgagtttatccttatatttgttaactatatccatggtgatacttgaaataatcggagaatgtttcccatttttaggattaacatagttgaataaatcctccatcacttcactaaatagtttttttgtttccttgtgtagatttgatacggctattctggcggctagaatggcataatccggatgttgtgtagtacaagtggctgctatttcggctgccagagtgtccaattctaccgttgttactccattatatattccttgaataaccttcatagctattttaataggatctatatgatccgtgtttaagccataacataattttctaatacgagacgtgattttatcaaacatgacattttccttgtatccatttcgtttaatgacaaacatttttgttggtgtaataaaaaaaattatttaacttttcattaatagggatttgacgtatgtagcgtacaaaattatcgttcctggtatatagataaagagtcctatatatttgaaaatcgttacggctcgattaaactttaatgattgcatagtgaatatatcattaggatttaactccttgactatcatggcggcgccagaaattaccatcaaaagcattaatacagttatgccgatcgcagttagaacggttatagcatccaccatttatatctaaaaattagatcaaagaatatgtgacaaagtcctagttgtatactgagaattgacgaaacaatgtttcttacatattttttttttattagtaaccgacttaatagtaggaactggaaaactagacttgattattctataagtatagatacccttccaaataatattctctttgataaaagttccagaaaatgtagaattttttaaaaagttatcttttgctattaccaagattgtgtttagacgcttattattaatatgagtgatgaaatccacaccgcctctagatatcgcttttatttccacattagatggtaaatccaatagtgaaactatctttttaggaatgtatggactcgcgtttagaggagtgaacgtcttaggcgtcggaaaggggccggcctttttttctagacactaaataaatagtaagattaaattaattataaaattatgtatataatattaattataaaattatgtatatgatttactaactttagttagataaattaataatacataaattttagtatattaatattataaattaataatacataaattttagtatattaatattatattttaaatatttatttagtgtctagaaaaaaaggcctagcaggcc

SEQ ID NO: 12 - DNA, 60021 bp, Artificial Sequence
  sMVA fragment F1
ggcctagcaggccggcctttttttctagacactaaataaatagtaagattaaattaattataaaattatgtatataatattaattataaaattatgtatatgatttactaactttagttagataaattaataatacataaattttagtatattaatattataaattaataatacataaattttagtatattaatattatattttaaatatttatttagtgtctagaaaaaaatgtgtgaccaacgaccgtaggaaactctagagggtaagaaaaatcaatcgctttatagagaccatcagaaagaggtttaatatttttgtgagaccatcgaaggagaaagagataaaacttttttacgactccatcagaaagaggtttaatatttttgtgagaccatcgaagagagaaagagataaaacttttttacgactccatcagaaagaggtttaatatttttgtgagaccatcgaagagagaaagagataaaacttttttacgactccatcagaaagaggtttaatatttttgtgagaccatcgaaggagaaagagataaaacttttttacgactccatcagaaagaggtttaatatttttgtgagaccatcgaaggagaaagagataaaacttttttacgactccatcagaaagaggtttaatatttttgtgagaccatcgaaggagaaagagataaaacttttttacgactccatcagaaagaggtttaatatttttgtgagaccatcgaagagagaaagagataaaacttttttacgactccatcagaaagaggtttaatatttttgtgagaccatcgaaggagaaagagataaaacttttttacgactccatcagaaagaggtttaatatttttgtgagaccatcgaagagagaaagagaataaaaatattttagtgacaccatcagaaagaggtttaatatttttgtgagaccatcgaagagagaaagagataaaacttttttacgactccatcagaaagaggtttaatatttttgtgagaccatcgaaggagaaagagataaaacttttttacgactccatcagaaagaggtttaatatttttgtgagaccatcgaagagagaaagagataaaacttttttacgactccatcagaaagaggtttaatatttttgtgagaccatcgaagagagaaagagataaaacttttttacgactccatcagaaagaccatcgaagagagaaagagaaagagatagttagtctagatatttttcttagtacaaaagtcaatgttttaaaatatatggacaagaatttgtctgtataaaaacttgtgtgaaattttgtaccaaagaaaaaatgtgagcagtatcccctacatggattttactagatcatttatataccaaaaaatattatacgatctacgttttattatatgattttaacgtgtaaattataaacattattttatgatatacaattgtctggtaacctagatgggcataggggatgagtatatgttgttggacgttattgtttaagaaatagttgatgcatcagaaagaggtttaatatttttgtgagaccatcgaagagagaaagagataaaacttttttacgactccatcagaaagaggtttaatatttttgtgagaccatcgaagagagaaagagataaaacttttttatgactccattgaagagagaatgagaataaaaatattttagtgacaccatcagaaagaggtttaatattttttatgagaccatcaaagagagaaagagaataaaaatattttatgactccattgaagagagaaagagaaaatgagaataaaaatattttagtgacaccatcagaaagaggtttaatattttttatgagaccatcaaagagagaaagagaataaaaatatttttgtaaaactttttttatgagaccatcaaagagagaaagagaataaaaatatttttgtaaaactttttttatgagaccatcaaagagagaaagagaataaaaatatttttgtaaaactttttttatgagaccatcaaagagagaaagagaataaaaatatttttgtaaaactttttttatgagaccatcaaagagagaaagagaataaaaatatttttgtaaaactttttttatgagaccatcaaagagagaaagagaataaaaatatttttgtaaaactttttttatgagaccatcaaagagagaaagagaataaaaatatttttgtaaaactttttttatgagaccatcaaagagagaaagagaataaaaatattttatgactccattgaagagagaaagagaataaaaatattttagtgacaccatcagaaagaggtttaatatttttgtgagaccatcgaagagagaaagagaataaaaatattttatgactccattgaagagagaaagagaataaaaatattttagtgacaccatcagaaagaggtttaatattttttatgagaccatcaaagagagaaagagaataaaaatatttttgtaaaactttttttatgagaccatcaaagagagaaagagaataaaaatatttttgtaaaactttttttatgagaccatcaaagagagaaagagaataaaaatatttttgtaaaactttttttatgagaccatcaaagagagaaagagaataaaaatatttttgtaaaactttttttatgagaccatcaaagagagaaagagaataaaaatatttttgtaaaactttttttatgagaccatcaaagagagaaagagaataaaaatattttatgactccattgaagagagaatgagaataaaaatattttagtgacaccatcagaaagaggtttaatatttttgtgagaccatcgaagagagaaagagaataaaaatattttatgactccattgaagagagaaagagaataaaaatattttagtgacaccatcagaaagaggtttaatattttttatgagaccatcaaagagagaaagagaataaaaatatttttgtaaaactttttttatgagaccatcaaagagagaaagagaataaaaatatttttgtaaaactttttttatgagaccatcaaagagagaaagagaataaaaatatttttgtaaaactttttttatgagaccatcaaagagagaaagagaataaaaatatttttgtaaaactttttttatgagaccatcaaagagagaaagagaataaaaatatttttgtaaaactttttttatgagaccatcaaagagagaaagagaataaaaatatttttgtaaaactttttttatgagaccatcaaagagagaaagagaataaaaatatttttgtaaaactttttttatgagaccatcaaagagagaaagagaataaaaatattttatgactccattgaagagagaatgagaataaaaatattttagtgacaccatcagaaagaggtttaatatttttgtgagaccatcgaagagagaaagagaataaaaatattttatgactccattgaagagagaatgagaataaaaatattttagtgacaccatcagaaagaggtttaatattttttatgagaccatcaaagagagaaagagaataaaaatatttttgtaaaactttttttatgagaccatcaaagagagaaagagaataaaaatatttttgtaaaaattataaacattattttatgatatacaattgtctggtaacctagatgggcataggggatgttgataagctcgacgagtatatgttgttggacgttattgtttaagaaatagttgatgcatcagaaagagaataaaaaatattttagtgagaccatcgaagagagaaagagataaaacttttttacgactccatcagaaagaggtttaatatttttgtgagaccatcgaagagagaaagagataaaacttttttacgactccatcagaaagaggtttaatatttttgtgagaccatcgaaggagaaagagataaaacttttttacgactccatcagaaagaggtttaatatttttgtgagaccatcaaagagagaaagagaataaaaatatttttgtaaaactttttttatgagaccatcaaagagagaaagagaataaaaatatttttgtaaaactttttttatgagaccatcaaagagagaaagagaataaaaatatttttgtaaaactttttttatgagaccatcaaagagagaaagagaataaaaatatttttgtaaaactttttttatgagaccatcaaagagagaaagagaataaaaatattttatgactccattgaagagagaatgagaataaaaatattttagtgacaccatcagaaagaggtttaatatttttgtgagaccatcgaagagagaaagagaataaaaatattttatgactccattgaagagagaatgagaataaaaatattttagtgacaccatcagaaagaggtttaatattttttatgagaccatcaaagagagaaagagaataaaaatatttttgtaaaactttttttatgagaccatcaaagagagaaagagaataaaaatatttttgtaaaactttttttatgagaccatcaaagagagaaagagaataaaaatatttttgtaaaactttttttatgagaccatcaaagagagaaagagaataaaaatatttttgtaaaactttttttatgagaccatcaaagagagaaagagaataaaaatattttatgactccattgaagagagaatgagaataaaaatattttagtgacaccatcagaaagaggtttaatatttttgtgagaccatcgaagagagaaagagaataaaaatattttatgactccattgaagagagaaagagaataaaaatattttagtgacaccatcagaaagaggtttaatattttttatgagaccatcaaagagagaaagagaataaaaatatttttgtaaaactttttttatgagaccatcaaagagagaaagagaataaaaatattttatgactccattgaagagagaatgagaataaaaatattttagtgacaccatcagaaagaggtttaatatttttgtgagaccatcgaagagagaaagagaataaaaatattttatgactccattgaagagagaatgagaataaaaatattttagtgacaccatcagaaagaggtttaatatttttgtgagaccatcgaagagagaaagagaataaaaatattttatgactccattgaagagagaatgagaataaaaatattttagtgacaccatcagaaagaggtttaatattttttatgagaccatcaaagagagaaagagaataaaaatatttttgtaaaactttttttatgagaccatcaaagagagaaagagaataaaaatatttttgtaaaactttttttatgagaccatcaaagagagaaagagaataaaaatatttttgtaaaactttttttatgagaccatcaaagagagaaagagaataaaaatatttttgtgagaccatcaaagagagaaagagaataaaaatatttttgtgagaccatcaaagagagaaagagaataaaaatatttttgtgagaccatcaaagagagaaagagaataaaaatattttatgactccattgaagagagaaagagaataaaaatattttagtgacaccatcagaaagaggtttaatatttttgtgagaccatcgaagagagaaagagaataaaaatattttatgactccattgaagagagaaagagaataaaaatattttagtgacaccatcagaaagaggtttaatattttttatgagaccatcaaagagagaaagagaataaaaatattttttatgagaccatcaaagagagaaagagaataaaaatattttatgagaccatcaaagagagaaagagaataaaaatattttttatgagaccatcaaagagagaaagagaataaaaatattttatgagaccatcaaagagagaaagagaataaaaatattttttatgagaccatcaaagagagaaagagaataaaaatatttttgtatgagaccatcagaaagaggtttaatatttttgtgataccctgaaaggaaataggaatagtgtcataatcgtatcacactattgagacagaaaaagaagaagtcgcgagaggtaactttttgttttgcaaaccggaatatagtgtccggtacacttttttaattcgtggtgtgcctgaatcgttcgattaaccctactcatccaatttcagatgaatagagttatcgattcagacacacgctttgagttttgttgaatcgatgagtgaagtatcatcggttgcaccttcagatgccgatccgtcgacatacttgacctcaagttcagatgattccttgcacatgtctccgatacgaacgctaaactctagattcttgacacattttgtatcgacgatcgttgaaccgatgatatcttcgtaactcactttcttatgagagatgttagacccgagtactggatgggtcttgatgtcgctgtctttctcttcttcgctacatctgatgtcgatagacacctcacagtctttccatcagcggattctgagatggatttaatctgaggacatttggtgaatccaaagttcattctcagacctccaccgatgatggagtaataagtggtaggaggatctacatcctcgactgattccacctcgggatctggatctgactcggactctgtaatttccgttacggattggcaaatcttatcatcggtcggtgtttggtcttgctttgtgactttgataataacatcgattcccatatgatgtttgttttcttcttccgtacacgatgaggatgattgctgaagactggcaggcacatgcatgccagtacgatatattgtttcatgattgctattgattgagtactgttctttatgattctacttccttaccgtgcaataaattagaatatattttctacttttacgagaaattaattattgtatttatgggtgaaaaacttactataaaaagcgggtgggtttggaattagtgatcagtttatgtatatcgcaactaccgggcatatggctacattacccacatgataagagattgtatcagtttcgtagtcttgagtattggtattactatatagtatatagatgtcgacgctagagttactgtctccgaatgcggcatgatagtatcattctttgctttcgttaactgtttggaggaagaatctttgttattgcatttaatctcgaaattcagagtgcacacctttctcctgtaaagaaacctgaagtcgctaccttattaagaagacgggatcgcagtctttatgattcatagtaatagttagttccgacgttgagatggattcgctgagaccggtagtggtcgtccgagtacacgatgtgtcgttaactggatacaggttaatttccacatcgatatagttaaaggtatttctgggtacgggttcgcatttatctgcggaagagacggtgtgagaatatgttccgagaccacacggagaacagatgacgtctccggatactccgtatcctattccacattttgtttgggaaacacatgccttgcatccatgatcgggagagcattcacagattctattgtgagtcgtgttacacgatcgcgtcgacattgttgacagaaacgtgaccttcattcttaccgtcgtccataaatacgttaggtatgtaccacatactgtcgcgaacgatgcgtccatctcataatgatttactttttcataattaaagatgtgaaagaaaaccgaacaatatatttttttagtaatgtttatgcgagacatataaaataaactccgtgtttatgatgccggtaaatgtttttatcatcttggacggaatcgattttgtaatatgccatggaaacaggacattatcactccatgataaattatttaatggagtcgatcctctcattgttctttgcgtatctcaatctgtggcgtttgcttcgtttaaataatatatcaaacatggagacgcctgatatgtaggcattcttcattctattaatgtctgctctatagcgctttagttccttatgacgaccggcgatatcatacttactttagaaggaaaatcatcatctaggattaaggcgtatctgatacaggcgaataatggttcaggatatagatagcgtatatctctattaaatgcgtcaatcatagtctctagagtgggatggtaactcagtaataaatcaactagcttctctttggtaactgcttttctggatggccgtattgattatcgagcgtgacactcgctccatattccaataaccgctttgcaaattgtatattattgacatcgaccgcgtaatatagtagagttatcgatcatatctatatcatccatgtacttgcttagtatatcaaatacatcttcataacagtgatacccgcaattattaaatctcgataatatcagaccgtacatacatagacggccattgttagatatgtgatttacagccgcgtgtccatattttccacgataaaccttacgacgtttacatcgacgagattattattaacaaagttgttgtccgtcgtcttatccaacatgcattgaatgataggtatacttaccatatcgccgtaatgtaagtagtttatcagtatggcttgtacgatggattcatcctgttgtctaaatctctttagaatgttatcgatgatgtagtggttatattctctggaatcgtacgaagtaatactacgcattacgtcgacaagagtatgacgtctctcaataagaagattaacgatttccatgtctacattatatggggttactctaaatcgcttgtttagataatacgcctctaatatagggctgacgtcgtatactctacacgtgtccacatcctttattaataatctctatatctatggttgagcaagaccagtagtattggatggaaacattgttatcgatcaaacatttaattacatccttggatagagattctctatgagacgatatatagtaatgaagagagttcttacacatatcactgttgtacatacaggtacgaaatacgtaaccggtgctgtaacattctgatttaagaagccatagcaatacttctggtctcggattaggcgtcgttacgtatatatccaccaatccgagaccattgattgcataattcgtattcttggacggacgtatccgtttatccacaattaggtattttagcagacgtaagtcgaaatcatttatattcgacttgagttcgttagaggaattcgaatagctggatatcagtagatgcacaatctgagattttacgtatctatgcttactgtatgctcctagcggagttaatccttcgttgtttctacaaagtctctcgactccgcgagagagtaacagtcgaacaatcttaatgtctgtatcgcatttattggagacgtaacaatgtagcgcattgtttcctcgtctatctatatgttttgataagttgtgacacgtttcaatttctagttttatttttttgtacgtcacatcttcatccagtagacgacatagaatacatgtgcaatccatagctattctggtgctaattattcctcataagatgataaaaagtgtagtgagagagcatgaaggagatttagtatttagcagtgcggatatgatccaagagggtgagatagtcgttctcgttcagaatctttcgcagcataagtagtatgtcgatatacttatcgttgaagactcttccagagacgatagctgattgagtacaaagtccaatgattgcacgaagttcttcggcggttttcatggagtcatttctgatgaaacatttaatgatctaaatttcagtttatgtttgtaccccgtattcatacttaacaaattggtattacataccattaataatgcaagcataaaaaatcgttagtagatgtttctaaatataggttccgtaagcaaagaatataagaatgaagcggtaatgataaaatcaatcgttatctaaaatgatcatactcatttattttattctattatattaacacatacatttttaacagcaacacattcaatattgtattgttatttttatattatttacacaattaacaatatattattagtttatattactgaattaataatataaaattcccaatcttgtcataaacacacactgagaaacagcataaacacaaaatccatcaaaaatgttgataaattatctgatgttgttgttcgctgctatgataatcagatcattcgccgatagtggtaacgctatcgaaacgacatcgccagaaattacaaacgctacaacagatattccagctatcagattatgcggtccagagggagatggatattgtttacacggtgactgtatccacgctagagatatcgacggtatgtattgtagatgctctcatggttatacaggcattagatgtcagcatgtagtattagtagactatcaacgttcagaaaaaccaaacactacaacgtcatatatcccatctcccggtattatgcttgtattagtaggcattattattattacgtgttgtctattatctgtttataggttcactcgacgaactaaactacctatacaagatatggttgtgccataatttttataaattttttttatgagtatttttacaaaaatgtataaagtgtatgtcttatgtatatttataaaaatgctaaatatgcgatgtatctatgttatttgtatttatctaaacaatacctctacctctagatattatacaaaaattttttatttcggcatattaaagtaaaatctagttaccttgaaaatgaatacagtgggtggttccgtatcaccagtaagaacataatagtcgaatacagtatccgattgagattttgcatacaatactagtctagaaagaaatttgtaatcatcttctgtgacgggagtccatatatctgtatcatcgtcccatgctatattcctgttatcatcattagttaatgaaaataactctcgtgcttcagaaaagtcaaatattgtatccatacatacatctccaaaactatcgcttatacgtttatctttaacgatacctatacctagatggttatttactaacagacattttccagatctattgactataactcctatagtttccacatcaaccaagtaatgatcatctattgttatataacaataacataactcttttccgtttttatcagtatgtatatctatatcaacgtcgtcgttgtagtgaatagtagtcattgatctattatatgaaacggatatgtctagaacggcaattgttttacgtccagttaacactttcgttgatttaaagtctagagtctttgcaaacataatatccttatccgactttatatttcctgtagggtggtataattttattttgcctccacatatcggtgtttccaaatatattactagacaatattccatatagttattagttaagggtacccaattagaacacgtacgcttattatcatcatttggatcgtatttcataaaagttattgtactatcgatgtcaacacattctacattttttaatcgtctatatagtatttttctgatattttctataatatcagaattgtcttccatcggaagttgtatactatcggaatcagttacatgtttaaataattctctgatgtcattccttatacaatcaaattcattattaaacagtttaatagtctgtagacctttatcgtcgtaaatatccattgtcttattagttacgcttatttttatgtgtttttacgttgctttattatattttataagaatgattgtttgacgaatcacgagaactattaagacacattattaggtatatattataaaaaagtttttgattacgatgttataagaggaaagaggacacattaacatcatacatcaattaactacattcttataacatcgtaatcaaaagaattgcaattttgatgtataacaactgtcaatgggttatggaattgtatattacatattatacggtatgttggtaacgacaaataccgatcggtaattgtctgccggtgtaatagaattatatatatctatctattacaccggccttgtatacataataataagttgtggtagtatgatctccatatttataatttaggactttgtattcagtttttttggaatcataaaaaataaaaaaaagttttactaatttaaaattatttacatttttttcactgtttagtcgcggatatggaattcgatcctgccaaaatcaatacatcatctatagatcatgtaacaatattacaatacatagatgaaccaaatgatataagactaacagtatgcattatcacaaaaataaatccacatttggctaatcaatttcgggcttggaaaaaacgtatcgccggaagggactatatgactaacttatctagagatacaggaatacaacaatcaaaacttactgaaactgtcaaaaaaatagaaacatatatggtctatatatacactacaatttagttattaattggataaccgatgtgattatcaatcaatattaagaaggttggtaaattggtacatagctaataatacctatacacccaataatacaacaaccatttctgagttggatatcatcaaaatactggataaatacgaggacgtgtatagagtaagtaaagaaaaagaatgtgaaatttgctatgaagttgtttactcaaaacgatagatactttggtttattggattcgtgtaatcatatattttgcataacatgcatcaatatatggcatagaacacgaagagaaaccggtgcgtcggataattgtcctatatgtcgtacccgttttagaaacataacaatgagcaagttaactaataaataaaaagtttaatttgttgacgacgtatgtcgttattttttctcgtataaaagattaatttgattctaatataatctttagtattggataaatatcaattcaaattaattccattagattatatcataaataaaaatagtagcacgcactacttcagccaaatattcttttttgaaacgccatctatcgtagtgaggacacaagtgaacctataatgagcaaatttattagtatcggttacatgaaggactttacgtagagtggtgattccactatctgtggtacgaacggtttcatcttctttgatgccatcacccagatgttctataaacttggtatcctttgccaaccaatacatatagctaaactcaggcatatgttccacacatcctgaacaatgaaattctccagaagatgttacaatgtctagatttggacatttggtttcaaccgcgttaacatatgagtgaacacacccatacatgaaagcgatgagaaataggattttcatcttgccaaaatatcactagaaaaaatttatttatcaattttaaaggtataaaaaatacttattgttgctcgaatattttgtatttgatggtatacggaagattagaaatgtaggtattatcatcaactgattctatggttttatgtattctatcatgtttcactattgcgttggaaataatatcatatgcttccacatatattttattttgttttaactcataatactcacgtaattctggattattgacatatctatgaataattttagctccatgatcagtaaatattaatgagaacatagtattaccacctaccattatttttttcatctcattcaattcttaattgcaaagatctatataatcattatagcgttgacttatggactctggaatcttagacgatgtacagtcatctataatcatggcatatttaatacattgttttatagcatagtcgttatctacgatgttagatatttctctcaatgaatcaatcacacaatctaatgtaggtttatgacataatagcattttcagcagttcaatgtttttagattcgttgatggcaatggctatacatgtatatccgttatttgatctaatgttgacatctgaaccggattctagcagtaaagatactagagattgtttattatatctaacagccttgtgaagaagtgtttctcctcgtttgtcaatcatgttaatgtctttaagataaggtaggcaaatgtttatagtactaagaattgggcaagcataagacatgtcacaaagaccctttttgtatgtataagtgtaaaaattataacattcatagttggatttacataggtgtccaatcgggatctctccatcatcgagataattgatggcatctcccttccttttttagtagatatttcatcgtgtaagaatcaatattaatatttctaaagtatccgtgtatagcctctttatttaccacagttccatattccactagagggatatcgccgaatgtcatatactcaattagtatatgttggaggacatccgagttcattgttttcaatatcaaaaagatggtttccttatcatttctccatagtggtacaatactacacattattccgtgcggctttccattttccaaaaacaatttgaccaaatctacatctttattgtatctataatcactatttagataatcagccataattactcgagtgcaacatgttagatcgtctatatatgaataagccgtgttatctattcctttcattaacaatttaacgatgtctatatctatatgagatgacttaatataatattgaagagctgtacaatagtttttatctataaaagacggcttgattccgtgattaattagacatttaacaacttccggacgcacatatgctctcgtatccgactctgaatacagatgagagatgatatacagatgcaatacggtaccgcaatttcgtagttgataatcatcatacgcgtatcagtactcgtcctcataaagaacactgcagccattttctatgaacaaatcaataatttcaggaacaggatcatctgtcattacataattttctataactgaacgatggttttcacatttaacactcaagtcaaatccatgttctaccaacacctttatcaagtcaacgtctacatttttggatttcatatagctgaatatattaaagtcatttatgttgctaaatccagtggcttctagtagagccatcgctatatcctttaactttaacatgtctactatttgtgtattcttctaatggggtagctgtctccaatttttgcgtaatggattagtgccactgtctagtagtagtttgacgacctcgacattattacaatgctcattaaaaaggtatgcgtgtaaagcattattcttgaattggttcctggtatcattaggatctctgtctctcaacatctgtttaagttcatcgagagccacctcctcattttccaaatagtcaaacattttgactgaatgagctactgtgaactctatacacccacacaactaatgtcattaaatatcatgtcaaaaacttgtacaattattaataaaaataatttagtgtttaaattttaccagttccagattttacacctccgttaaccccactttttacaccactggacgatcctcctccccacattccaccgccaccagatgtataagttttagatcctttattactaccatcatgtccatggataaagacactccacatgccgccactaccccctttagaagacatattaataagacttaaggacaagtttaacaataaaattaatcacgagtaccctactaccaacctacactattatatgattatagtttctatttttacagtaccttaactaaagtctctagtcacaagagcaatactaccaacctacactattatatgattatagtttctatttttataggaacgcgtacgagaaaatcaaatgtctaatttctaacggtagtgttgataaacgattatcgtcaatggatacctcctctatcatgtcgtctattttcttactttgttctattaacttattagcattatatattatttgattataaaacttatattgcttattagcccaatctgtaaatatcggattattaacatatcgtttctttgtaggtttatttaacatgtacatcactgtaagcatgtccgtaccatttattttaatttgacgcatatccgcaatttctttttcgcagtcggttataaattctatatatgatggatacatgctacatgtgtacttataatcgactaatatgaagtacttgatacatattttcagtaacgatttattattaccacctatgaataagtacctgtgatcgtctaggtaatcaactgttttcttaatacattcgatggttggtaatttactcagaataatttccaatatcttaatatataattctgctatttctgggatatatttatctgccagtataacacaaatagtaatacatgtaaacccatattttgttattatattaatgtctgcgccattatctattaaccattctactaggctgacactatgcgacttaatacaatgataaagtatactacatccatgtttatatcatcaatatacggcttacaaagttttagtatcgataacacatccaactcacgcatagagaaggtagggaataatggcataatatttattaggttatcatcattgtcattatctacaactaagtttccattttttaaaatatactcgacaactttaggatctctattgccaaatttttgaaaatatttatttatatgcttaaatctatataatgtagctccttcatcaatcatacatttaataacattgatgtatactgtatgataagatacatattctaacaatagatcttgtatagaatctgtatatcttttaagaattgtggatattattacgtaaactattacacaattctaaaatataaaacgtatcacggtcgaataatagttgatcaactatataattatcgattttgtgatttttcttcctaaactgtttacgtaaatagttagatagaatattcattagttcatgaccactatagttactatcgaataacgcgtcaaatatttcccgtttaatatcgcatttgtcaagataataatagagtgtggtatgttcacgataagtataataacgcatctctttttcgtgtgaaattaaatagtttattacgtccaaagatgtagcataaccatcttgtgacctagtaataatataataatagagaactgttttacccattctatcatcataatcagtggtgtagtcgtaatcgtaattgtctaattcatcatcccaattataatattcaccagcacgtctaatctgttctattttgatcttgtatccatactgtatgttgctacatgtaggtattcctttatccaataatagtttaaacacatctacattgggatttgatgttgtagcgtatttttctacaatattaataccatttttgatactatttatttctatacctttcgaaattagtaatttcaataagtctatatcgatgttatcagaacatagatattcgagtatatcaaaatcattgatatttttatagtcgactgacgacaataacaaaatcacaacatcgtttttgatattattatttttcttggtaacgtatgcctttaatggagtttcaccatcatactcatataatggatttgcaccactttctatcaatgattgtgcactgctggcatcgatgttaaatgttttacaactatcatagagtatcttatcgttaaccatgattggttgttgatgctatcgcattttttggtttctttcatttcagttatgtatggatttagcacgtttgggaagcatgagctcatatgatttcagtactgtagtgtcagtactattagtttcaataagatcaatctctagatctatagaatcaaaacacgataggtcagaagataatgaatatctgtaggcttcttgttgtactgtaacttctcgttttgttagatgtttgcatcgtgctttaacatcaatggtacaaattttatcctcgctttgtgtatcatattcgtccctactataaaattgtatattcagattatcatgagatgtgtatacgctaacggtatcaataaacggagcacaccatttagtcataaccgtaatccaaaaatttttaaagtatatcttaacgaaagaagttgtgtcattgtctacggtgtatggtactagatcctcataagtgtatatatctagagtaatgtttaatttatcaaatggttgataatatggatcctcatgacaatttccgaagatggaaatgagatatagacatgcaataaatctaattgcggacatggttactccttaaaaaaatacgaataatcaccttggctatttagtaagtgtcatttaacactatactcatattaatccatggactcataatctctatacgggattaacggatgttctatatacggggatgagtagttttcttctttaactttatactttttactaatcatatttagactgatgtatgggtaatagtgtttaaagagttcgttctcatcatcagaataaatcaatatctctgtttttttgttatacagatgtattacagcctcatatattacgtaatagaacgtgtcatctaccttattaactttcaccgcatagttgtttgcaaatacggttaatcctttgacctcgtcgatttccgaccaatctgggcgtataatgaatctaaactttaatttcttgtaatcattcgaaataatttttagtttgcatccgtagttatcccctttatgtaactgtaaatttctcaacgcgatatctccattaataatgatgtcgaattcgtgctgtatacccatactgaatggatgaacgaataccgacggcgttaatagtaatttactttttcatctttacatattgggtactagttttactatcataagtttataaattccacaagctactatggaataagccaaccatcttagtataacacacatgtcttaaagtttattaattaattacatgttgttttatatatcgctacgaatttaaacagagaaatcagtttaggaaaaaaaaatatctatctacatcatcacgtctctgtattctacgatagagtgctactttaagatgagacatatccgtgtcatcaaaaatatactccattaaaatgattattccggcagcgaacttgatattggatatatcacaacctttgttaatatctacgacaatagacagcagtcccatggttccataaacagtgagtttatctttctttgaagagatattttgtagagatcttataaaactgtcgaatgacatcgcatttatatctttagctaaatcgtatatgttaccatcgtaatatctaaccgcgtctatcttaaacgtttccatcgctttaaagacgtttccgatagatggtctcatttcatcagtcatactgagccaacaaatataatcgtgtataacatctttgatagaatcagactctaaagaaaacgaatcggctttattatacgcattcatgataaacttaatgaaaaatgtttttcgttgtttaagttggatgaatagtatgtcttaataattgttattatttcattaattaatatttagtaacgagtacactctataaaaacgagaatgacataactagttatcaaagtgtctaggacgcgtaattttcatatggtatagatcctgtaagcattgtctgtattctggagctattttctctatatctaatttctgaacgttcaccaatgtctctagccactttggcactaatagcgatcattcgcttagcgtcttctatattattaactggttgattcaatctatctagcaatggaccgtcggacagcgtcattctcatgttcttaatcaatgtacatacatcgccgtcatctaccaattcatccaacaacataagctttttaaaatcatcattataataggtttgatcgttgtcatttctccaaagaatatatctaataagtagagtcctcatgattagttaacaactattttttatgttaaatcaattagtacaccgctatgtttaatacttattcatattttagtttttaggattgagaatcaatacaaaaattaatgcatcattaattttagaaatacttagtttccacgtagtcaatgaaacatttgaactcatcgtacaggacgttctcgtacaggacgtaactataaaccggtttatatttgttcaagatagatacaaatccgataactttttttacgaattctacgggatccactttaaaagtgtcataccgggttctttttatttttttaaacagattaatggtgtgatgttgattaggtcttttacgaatttgatatagaatagcgtttacatattctccataatggtcaatcgccatttgttcgtatgtcataaattctttaattatatgacactgtgtattatttagttcatccttgttcatcattaggaatctatccaatatggcaattatactagaactataggtgcgttgtatacacatattgatgtgtctgtttatacaatccatgctactaccttcgggtaaaattgtagcatcatataccatttctagtactttaggttcattgttatccattgcagaggacgtcatgaacgcatcctaaaaaaatatattatttttatgttattttgttaaaaataatcatcgaatacgaatcatccagtccactgaatagcaaaatctttactattttggtatcttccaatgtggctgcctgatgtaatggaaattcattctctagaagatttttcaatgctccagcgttcaacaacgtacatactagacgcacgttattatcagctattgcataatacaaggcactatgtccatggacatccgccttaaatgcatctttgctagagagaaagcttttcagctgcttagacttccaagtattaattcgtgacagatccatgtctgaaacgagacgctaattagtgtataatttttgtcatattgcaccagaattaataatatctctaatagatctgattagtagatacatggctatcgcaaaacaacatatacacatttaataaaaataatatttattaagaaaattcagatttcacgtacccatcaatataaataaaataatgattccttacaccgtacccatattaaggagattctaccttacccataaacaatataaatccagtaatatcatgtctgatgatgaacacaaatggtgtattaaattccagtttttcaggagatgatctcgccgtagctaccataatagtagatgcctctgctacagttccttgttcgtcgacatctatctttgcattctgaaacattttataaatatataatgggtccctagtcatatgtttaaacgacgcattatctggattaaacatactaggagccatcatttcggctatcgacttaatatccctcttattttcgatagaaaatttagggagtttaagattgtacactttattccctaattgaaacgaccaatagtctaattttgcagccgtaatagaatctgtgaaatgggtcatattatcacctattgccaggtacatactaatattagcatccttatacggaaggcgtaccatgtcatattctttgtcatcgattgtgattgtatttccttgcaatttagtaactacgttcatcatgggaaccgttttcgtaccgtacttattagtaaaactagcattgcgtgttttagtgatatcaaacggatattgccatatacctttaaaatatatagtattaatgattgcccatagagtattattgtcgagcatattagaatctactacattagacataccggatctacgttctactatagaattaattttattaaccgcatctcgtctaaagtttaatctatataggccgaatctatgatattgttgataatacgacggtttaatacacacagtattatctacgaaactttgataagttagatcagtgtacgtatatttagatgttttcagcttagctaatcctgatattaattctgtaaatgctggacccagatctctttttctcaaatccatagtcttcaataattctattctagtattacctgatgcaggcaatagcgacataaacatagaaaacgaataaccaaacggtgagaagacaatattatcatcttgaatatttttatacgctactataccggcattggtaaatccttgtagacgataggtagacgctgaacacgttaacgatagtatcaataacgcaatcatgattttatggtattaataattaaccttatttttatgttcggtataaaaattattgatgtctacacatccttttgtaattgacatctatatatccttttgtataatcaactctaatcactttaacttttacagttttccctaccagtttatccctatattcaacatatctatccatatgcatcttaacactctctgccaagatagcttcagagtgaggatagtcaaaaagataaatatatagagcataatcattctcgtatactctgccctttattacatcgcccgcattgggcaacgaataacaaaatgcaagcatcttgttaacgggctcgtaaattgggataaaaattatgtttttatatctattttattcaagagaatattcaggaatttctttttccggttgtatctcatcgcagtatatatcatttgtacattgtttcatattttttaatagtttacaccttttagtaggactagtatcgtacaattcatagctgtattttgaattccaatcacgcataaaaatatcttctaattgttgacgaagacctaatccatcatccggtgtaatattaatagatgctccacatgtatccgtaaagtaatttcctgtccaatttgaggtacctatataggccgttttatcggttaccatatatttggcatggtttaccctagaatacggaatgggaggatcagcatctggtacaataaatagctttacttctatatttatgtttttagattttagcatagcgatagatcttaaaaagtttctcatgataaacgaagatcgttgccagcaactaatcaatagcttaacggatacttgtctgtctatagcggatcttcttaattcatcttctatataaggccaaaacaaaattttacccgccttcgaataaataatagggataaagttcataacagatacataaacgaatttactcgcatttctaatacatgacaataaagcggttaaatcattggttctttccatagtacatagttgttgcggtgcagaagcaataaatacagagtgtggaacaccacttacgttaatactaagaggatgatctgtattataatacgacggataaaagtttttccaattatatggtagattgttaactccaagataccagtatacctcaaaaatttgagtgagatccgctgccaagttcctattattgaagatcgcaatacccaattctttgacctgagttagtgatctccaatccatgttagcgcttcctaaataaatatgtgtattatcagatatccaaaattttgtatgaagaactcctcctaggatatttgtaatatctatgtatcgtacttcaactccggccatttgtagtctttcaacatcctttaatggtttgttagatttattgacggctactctaactcgtactcctcttttgggtaattgtacaatctcgtttaatattatcgtgccgaaattcgtacccacttcatccgataaactccaataaaaagatgatatatctagtgtttttgtggtattggatagaatttccctccacatgttaaatgtagacaaatatactttatcaaattgcatacctataggaatagtctctgtaatcactgcgattgtattatccggattcattttatttgttaaaagaataatcctatatcacttcactctattaaaaatccaagtttctatttctttcatgactgattttttaacttcatccgtttccttatgaagatgatgtttggcaccttcataaatttttatttctctattacaatttgcatgttgcatgaaataatatgcacctaaaacatcgctaatctcattgtttgttccctggagtatgagagtcggggtgttaatcttggaaattatttttctaaccttgttggtagccttcaagacctgactagcaaatccagccttaattttttcatgattgattaatgggtcgtattggtatttataaactttatccatatctctagatactgattctggacatagctttccgactggcgcatttggtgtgatggttcccataagtttggcagctagcagattcagtcttgaaacagcatctgcattaactagaggagacattagaatcattgctgtaaacaagtttggattatcgtaagaggctagtatagaaattgttgctcccatggaatgacccaataagtagatttaatagttaccacgtgctgtaccaaagtcatcaatcatcattttttcaccattacttcttccatgtccaatatgatcatgtgagaatactaaaattcctaacgatgatatgttttcagctagttcgtcataacgtccagaatgtttaccagctccatgacttatgaatactaatgccttaggatatgtaatcattgtccagattgaacatacagtttgcactcatgattcacgttatataactatcaatattaacagttcgtttgatgatcatattatttttatgttttattgataattgtaaaaacatacaattaaatcaatatagaggaaggagacggctactgtcttttgtgagatagtcatggcgactaaattagattatgaggatgctgttttttactttgtggatgatgataaaatatgtagtcgcgactccatcatcgatctaatagatgaatatattacgtggagaaatcatgttatagtgtttaacaaagatattaccagttgtggaagactgtacaaggaattgatgaagttcgatgatgtcgctatacggtactatggtattgataaaattaatgagattgtcgaagctatgagcgaaggagaccactacatcaattttacaaaagtccatgatcaggaaagtttattcgctaccataggaatatgtgctaaaatcactgaacattggggatacaaaaagatttcagaatctagattccaatcattgggaaacattacagatctgatgaccgacgataatataaacatcttgatactttttctagaaaaaaaattgaattgatgatataggggtcttcataacgcataattattacgttagcattctatatccgtgttaaaaaaaattatcctatcatgtatttgagagttttatatgtagcaaacatgatagctgtgatgccaataagctttagatattcacgcgtgctagtgttagggatggtattatctggtggtgaaatgtccgttatataatctacaaaacaatcatcgcatatagtatgcgatagtagagtaaacatttttatagtttttactggattcatacatcgtctacccaattcggttatgaatgaaattgtcgccaatcttacacccaaccccttgttatccattagtatagtattaacttcgttatttatgtcataaactgtaaatgattttgtagatgccatatcatacatgatattcatgtccctattataatcattactaactttatcacaatatatgttgataatatctatatatgatctagtctttgtgggcaactgtctatacaagtcgtctaaacgttgtttactcatatagtatcgaacagccatcattacatggtcccgttccgttgatagataatcgagtatgttagtggacttgtcaaatctatataccatattttctggaagtggatatacatagtcgtgatcaacattattgctagcctcatcttctatatcctgtactataccatctacataatctacgatattattacacataaacatcgacaacatactattgtttattatctaagtcctgttgatccaaacccttgatctcctctatttgtactatctagagattgtacttcttccagttctggataatatatacgttgatagattagctgagctattctatctccagtatttacattaaacgtacattttccattattaataagaatgactcctatgtttcccctataatcttcgtctattacaccacctcctatatcaatgccttttagtgacagaccagacctaggagctattctaccatagcaaatcttaggcatggacatactaatatctgtcttaattaactgtctttctcctggagggatagtataatcgtaagcgctatacaaatcatatccggcagcacccggcgattgcctagtaggagatttagctctgttagtttccttaacaaatctaactggtgagttaatattcatgttgaacataaaactaatattttatttcaaaattatttaccatcccatatattccatgaataagtgtgatgattgtacacttctatagtatctatatacgattcacgataaaatcctcctatcaatagcagtttattatccactatgatcaattctggattatccctcggataaataggatcatctatcagagtccatgtattgctggattcacaataaaattccgcatttctaccaaccaagaataaccttctaccgaacactaacgcgcatgatttataatgaggataataagtggatggtccaaactgccactgatcatgattgggtagcaaatattctgtagttgtatcagtttcagaatgtcctcccattacgtatataacattgtttatggatgccactgctggattacatctaggtttcagaagactcggcatattaacccaagcagcatccccgtggaaccaacgctcaacagatgtgggatttggtagacctcctactacgtataatttattgttagcgggtatcccgctagcatacagtctggggctattcatcggaggaattggaatccaattgtttgatatataatttacagctatagcattgttatgtatttcattgttcatccatccaccgatgagatatactacttctccaacatgagtacttgtacacatatggaatatatctataatttgatccatgttcataggatactctatgaatggatacttgtatgatttgcgtggttgtttatcacaatgaaatattttggtacagtctagtatccattttacattatttatacctctgggagaaagataatttgacctgattacatttttgataaggagtagcagatttcctaatttatttcttcgctttatataccacttaatgacaaaatcctcatctggaacatttagttcatcgctttctagaataagtttcatagatagataatcaaaattgtctatgatgtcatcttccagttccaaaaagtgtttggcaataaagtttttagtatgacataagagattggatagtccgtattctatacccatcatgtaacactcgacacaatattcctttctaaaatctcgtaggataaagtttatacaagtgtagatgataaattctacagaggttaatatagaagcacgtaataaattgacgacgttatgactatctatatatacctttccagtatatgagtaaataactatagaagttagactgtgaatgtcaaggtctagacaaaccctcgtaactggatctttatttttcgtgtatttttgacgtaaatgtgtgcgaaagtaaggagataactttttcaatatcgtagaattgactattatattgcctcctatggcatcaataattgttttgaatttcttagtcatagacaatgctaatatattcttacagtacacagtattgacaaatatcggcatttatgtttctttaaaagtcaacatctaaagaaaaatgattatcttcttgagacataactcccattttttggtattcacccacacgtttttcgaaaaaattagttttaccttctaatgatatattttccatgaaatcaaacggattggtaacattataaatttttttaaatcccaattcagaaatcaatctatccgcgacgaattctatatatgttttcatcatttcacaattcattcctataagtttaactggaagagccgcagtaagaaattcttgttcaatggataccgcatctgttataatagatctaacggtttcttcactcggtggatgcaataaatgtttaaacatcaaacatgcgaagtcgcagtgtagaccctcgtctctactaatcaattcgttggaaaacgtgagtccgggcattaggccacgctttttaagccaaaatatggaagcgaatgatccggaaaagaagattccttctactgcagcaaaggcaataagtctctctccataaccggcgctgtcatgtatccacttttgagcccaatcggccttcttttttacacaaggcatcgtttctatggcattaaagagatagtttttttcattactatctttaacataagtatcgatcaaaagactatacatttccgaatgaatgttttcaatggccatctgaaatccgtagaaacatctagcctcggtaatctgtacttctgtacaaaatcgttccgccaaattttcattcactattccgtcactggctgcaaaaaacgccaatacatgttttataaaatatttttcgtctggtgttagtttattccaatcattgatatctttagatatatctacttcttccactgtccaaaatgatgcctctgcctttttatacatgttccagatgtcatgatattggattgggaaaataacaaatctatttggatttggtgcaaggatgggttccataactaaattaacaataacaataaattttttttcagttatctatatgcctgtacttggatcttttgtacatcgatatcgccgcaatcactacaataattacaagtattattgatagcattgttattagtactatcataattaaattatcgttattatcattttgtaattgtgacatcatactagataaatcgtttgcgagattgttgtgggaagcgggcatggaggatgaattatcgttattattatttaaagcctcccattcggattcacaaatatggcgcgcgttcaacattttatggaaacagataacaagaaaactcgtcatcgttcaaatttttaacgatagtaaaccgattaaacgtcgagctaatttctaacgctagcgactctgttggatatgggtttccagatatatatcttttcagttcccctacgtatctataatcatctgtaggaaatggaagatatttccatttatctactgttcctaatatcatatgtggtggtgtagtagaaccattaagcgcgaaagatgttatttcgcatcgtattttaacttcgcaataatttctggttagataacgcactctaccagtcaagtcaatgatattagcctttacagatatattcatagtagtcgtaacgatgactccatcttttagatgcgatactcctttgtatgtaccagaatcttcgtacctcaaactcgatatatttaaacaagttaatgagatattaacgcgttttatgaatgatgatatataaccagaagttttatcctcggtggctagcgctataaccttatcattataataccaactagtgtgattaatatgtgacacgttagtgtgggtacaaatatgtacattatcgtctacgtcgtattcgatacatccgcatacagccaacaaatataaaatgacaaatactctaacgccgttcgtacccatcttgatgcggtttaataaatgttttgatttcaatttattgtaaaaaaagattcggttttatactgttcgatattctcattgcttatattttcatctatcatctccacacagtcaaatccgtggttagcatgcacctcatcaaccggtaaaagactatcggactcttctatcattataactctagaatatttaatttggtcattattaatcaagtcaattatcttatttttaacaaacgtgagtattttactcattttttataaaaacttttagaaatatacagactctatcgtgtgtctatatcttctttttatatccaatgtatttatgtctgatttttcttcatttatcatatataatggtccaaattctacacgtgcttcggattcatccagatcattaaggttcttataattgtaacatccttctcttccctcttctacatcttccttcttattcttattcttagcgtcacagaatctaccacagcaggatcccatgacgagcgtcatattaaactaatccattttcaattataatatacgattagtaatgaccattaaaataaaaatattcttcataaccggcaagaaagtgaaaagttcacattgaaactatgtcagtagtatacatcatgaaatgatgatatatatatactctattttggtggaggattatatgatataattcgtggataatcattcttaagacacatttcttcattcgtaaatcttttcacgttaaatgagtgtccatattttgcaatttcttcatatgatggcggtgtacgtggacgaggctgctcctgttcttgttgtagtcgccgactgtcgtgtctgcgtttagatccctccattatcgcgattgcgtagatggagtactattttataccttgtaattaaatttttttattaattaaacgtataaaaacgttccgtatctgtatttaagagccagatttcgtctaatagaacaaatagctacagtaaaaataactagaataattgctacacccactagaaaccacggatcgtaatacggcaatcggttttcgataataggtggaacgtatattttatttaaggacttaacaattgtctgtaaaccacaatttgcttccgcggatcctgtattaactatctgtaaaagcatatgttgaccgggcggagccgaacattctccgatatccaatttctgtatatctataatattattaacctccgcatacgcattacagttcttttctagcttggataccgcactaggtacatcgtctagatctattcctatttcctcagcgatagctcttctatccttttccggaagcaatgaaatcacttcaataaatgattcaaccatgagtgtgaaactaagtcgagaattactcatgcatttgttagttattcggagcgcgcaatttttaaactgtcctataacctctcctatatgaatagcacaagtgacattagtagggatagaatgttgagctaatttttgtaaataactatctataaaaagattatacaaagttttaaactctttagtttccgccatttatccagtctgagaaaatgtctctcataataaatttttccaagaaactaattgggtgaagaatggaaacctttaatctatatttatcacagtctgttttggtacacatgatgaattcttccaatgccgtactaaattcgatatctttttcgatttctggatatgtttttaataaagtatgaacaaagaaatggaaatcgtaataccagttatgtttaactttgaaattgttttttattttcttgttaatgattccagccacttgggaaaagtcaaagtcgtttaatgccgatttaatacgttcattaaaaacaaactttttatcctttagatgaattattattggttcattggaatcaaaaagtaagatattatcgggtttaagatctgcgtgtaaaaagttgtcgcagcatggtagttcgtaaattttaatgtataacagagccatctgtaaaaagataaactttatgtattgtaccaaagatttaaatcctaatttgatagctagctcggtatctactttatctgccgaatacagtgctaggggaaaaattataatatttcctctttcgtattcgtagttagttctcttttcatgttcgaaaaagtgaaacatgcggttaaaatagtttataacattaatattactgttaataactgccggataaaagtgggatagtaatttcacgaatttgatactgtcctttctctcgttaaacgcctttaaaaaaactttagaagaatatctcaatgatagttcctgaccatccatagtttgtatcaataatagcaacatatgaagaacacgtttatacagagtatgtaaaaatgttaatttatagtttaatcccatggcccacgcacacacgattaattttttttcatctccctttagattgttgtatagaaatttgggtactgtgaactccgccgtagtttccatgggactatataattttgtggcctcgaatacaaattttactacatagttatctatcttaaagactataccatatcctcctgtagatatgtgataaaaatcgtcgtttataggataaaatcgtttatccttttgttggaaaaaggatgaattaatgtaatcattctcttctatctttagtagtgtttccttattaaaattcttaaaataatttaacaatctaactgatggagcccaattttggtgtaaatctaattgggacattatattgttaaaatacaaacagtctcctaatataacagtatctgataatctatggggagacatccattgatattcaggggatgaatcattggcaacacccatttattgtacaaaaagccccaatttacaaacgaaagtccaggtttgatagagacaaactattaactattttgtctctgtttttaatttctttggtaatgaaattattcacaatatcagtatcttctttatctaccagagattttactaacttgataaccttggctgtctcattcaatagggtagtaatatttgtatgtgtgatattgatatcttttagaagtgattctttgatggtgccagcatacgaattacaataatgcagaaactcggttaacatgcaggaattatagtaagccaattccaattgttgcctgtgttgtattagagtgtcaatatgagcaatggtgtccttgcgtttctctgatagaatgcgagcagcgattttggcgttatcatttgacgatatttctggaatgacgaatcctgtttctactaactttttggtaggacaaagtgaaacaatcaagaagatagcttctcctcctatttgtggaagaaattgaactcctctagatgatctccttgacagatattggaccgaattacagaagtacctggaatgtaaagccctgaaaccccctcattttttaagcagattgttgccgtaaatcctgcactatgcccaagatagagagctcctttggtgaatccatctctatgtttcagtttaaccaagaaacagtcagctggtctaaaatttccatctctatctaatacagcatctaacttgatgtcaggaactatgaccggttatgttatatgtaacattgagtaaatccttaagttcataatcatcactgtcatcagttatgtacgatccaaacaatgtttctactggcatagtggatacgaagatgctatccatcagaatgtttccctgattagtattttctatatagctattcttctttaaacgattttccaaatcagtaactatgttcatttttttaggagtaggacgcctagccagtatggaagaggattttctagatcctctcttcaacatctttgatctcaatggaatgcaaaaccccatagtgtaacaaccaacgataaaaataatattgtttttcactttttataattttaccatctgactcatggattcattaatatctttataagagctactaacgtataattctttataactgaactgagatatatacaccggatctatggtttccataattgagtaaatgaatgctcggcaataactaatggcaaatgtataaaacaacgaaattatactagagttgttaaagttaatattttctatgagctgttccaataaattatttgttgtaactgcgttcaagtcataaatcatcttgatactatccagtaaaccgtttttaagttctggaatattattatcccattgtaaagcccctaattcgactatcgaatatcctgctctgatagcagtttcaatatcgacggacgtcaatactgtaataaaggtggtagtattgtcatcatcgtgataaactactggaatatggtcgttagtaggtacggtaactttacacaacgcgatatataactttccttttgtaccatttttaacgtagttgggacgtcctgcagggtattgttttgaagaaatgatatcgagaacagatttgatacgatatttgttggattcctgattatttactataatataatctagacagatagatgattcgataaatagagaaggtatatcgttggtaggataatacatccccattccagtattctcggatactctattaatgacactagttaagaacatgtcttctattctagaaaacgaaaacatcctacatggactcattaaaacttctaacgctcctgattgtgtctcgaatgcctcgtacaaggatttcaaggatgccatagattctttgaccaacgatttagaattgcgtttagcatctgatttttttattaaatcgaatggtcggctctctggtttgctaccccaatgataacaatagtcttgtaaagataaaccgcaagaaaatttatacgcatccatccaaataaccctagcaccatcggatgatattaatgtattattatagattttccatccacagttattgggccagtatactgttagcaacggtatatcgaatagattactcatgtaacctactagaatgatagttcgtgtactagtcataatatctttaatccaatctaagaaatttaaaattagattttttacactgttaaagttaacaaaggtattacccggatacgtggatatcatatatggtattggtccattatcagtaatagctccataaactgatacggcgatggtttttatatgtgtttgatctaacgaggaagaaattcgcgcccacaattcatctctagatatgtatttaatatcaaacggtaacacatcaatttcgggacgcgtatatgtttctaaatttttaatccaaatataatgatgacctatatgccctattatcatactgtcaactatagtacacctagagaacttacgatacatctgtttcctataatcgttaaattttacaaatctataacatgctaaaccttttgacgacaaccattcattaatttctgatatggaatctgtattctcaataccgtatcgttctaaagccagtgctatatctccctgttcgtgagaacgctttcgtataatatcgatcaacggataatctgaagtttttggagaataatatgactcatgatctatttcgtccataaacaatctagacataggaattggaggcgatgatcttaattttgtgcaatgagtcgtcaatcctataacttctaatattgtaatattcatcatcgacataacactatctatgttatcatcgtatattagtataccatgaccttcttcatttcgtgccaaaatgatatacagtcttaaatagttacgcaatatctcaatagtttcataattgttagctgttttcatcaaggtttgtatcctgtttaacatgatggcgttctatacgtttctattttttaaatttttaacgatttactgtggctagatacccaatctctctcaaatatttttttagcctcgcttacaagctgtttatctatactattaaaactgacgaatccgtgattttggtaatgggttccgtcgaaatttgccgaagtgatatgaacatattcgtcgtcgactatcaacaattttgtattattctgaatagtgaaaaccttcacagatagatcattttgaacacacaacgcgtctagacttctggcggttgccatagaatatacgtcgttcttatcccaattaccaactagaagtctgatcttaactcctctattaatggctgcttctataatggagttgtaaatgtcgggccaatagtagctattaccgtcgacacgtgtagtgggaactatggccaaatgttcaatatctatactagtcttagccgacttgagtttatcaataactacatcagtgtctagatctctagaatatcccaataggtgttccggagaatcagtaaagaacactccacctataggattcttaatatgatacgcagtgctaactggcagacaacaagccgcagagcataaattcaaccatgaattttttgcgctattaaaggctttaaaagtatcaaatcttctacgaagatctgtggccagcgggggataatcagaatatacacctaacgttttaatcgtatgtatagatcctccagtaaatgacgcgtttcctacataacatctttcattatctgacacccaaaaacaaccgagtagtagtcccacattattttttttatctatattaacggttataaaatttatatccgggcagtgactttgtagctctcccagatttcttttccctcgttcatctagcaaaactattattttaatccctttttcagatgcctcttttagtttatcaaaaataagcgctcccctagtcgtactcagaggattacaacaaaaagatgctatgtatatatatttcttagctagagtgataatttcgttaaaacattcaaatgttgttaaatgatcggatctaaaatccatattttctggtagtgtttctaccagcctacattttgctcccgcaggtaccggtgcaaatggccacatttagttaacataaaaacttatacatcctgttctatcaacgattctagaatatcatcggctatatcgctaaaattttcatcaaagtcgacatcacaacctaactcagtcaatatattaagaagttccatgatgtcatcttcgtctatttctatatccgtatccattgtagattgttgaccgattatcgagtttaaatcattactaatactcaatccttcagaatacaatctgtgtttcattgtaaatttataggcggtgtatttaagttggtagattttcaattatgtatcaatatagcaacagtagttcttgctcctccttgattctagcatcctcttcattattttcttctacgtacataaacatgtccaatacgttagacaacacaccgacgatggcggccgccacagacacgaatatgactaaaccgatgaccatttaaaaacccctctctagctttcacttaaactgtatcgattattcttttagaacatgtataatataaaaacattattctatttcgaatttaggcttccaaaaatttttcatccgtaaaccgataataatatatatagacttgttaatagtcggaataaatagattaatgcttaaactatcatcatctccacgattagagatacaatatttacattttttttgctgtttcgaaactttatcaatacacgttaatacaaacccaggaaggagatattgaaactgaggctgttgaaaatgaaacggtgaatacaataattcagataatgtaaaatcatgattccgtattctgatgatattagaactgctaatggatgtcgatggtatgtatctaggagtatctattttaacaaagcatcgatttgctaatatacaattatcattttgattaattgttattttattcatattcttaaaaggtttcatatttatcaattcttctacattaaaaatttccatttttaatttatgtagccccgcaatactcctcattacgtttcattttttgtctataatatccattttgttcatctcggtacatagattatccaattgagaagcgcatttagtagttttgtacattttaagtttattgacgaatcgtcgaaaactagttatagttaacattttattatttgataccctgatattaatacccctgccgttactattatttataactgatgtaatccacgtaacattggaattaactatcgatagtaatgcatcgacgcttccaaaattgtctattataaactcaccgataatttttttattacatgttttcatattcattaggattattaaatctttaatcttactacgattgtatgcgttgatattgcaagacgtcattctaaaagacggaggatctccatcaaatgccagacaatcacgtacaaagtacatggaaataggttttgttctattgcgcatcatagatttatatagaacacccgtagaaatactaatttgttttactctataaaatactaatgcatctatttcatcgttttgtataacgtctttccaagtgtcaaattccaaatttttttcattgatagtaccaaattcttctatctctttaactacttgcatagataggtaattacagtgatgcctacatgccgttttttgaaactgaatagatgcgtctagaagcgatgctacgctagtcacaatcaccactttcatatttagaatatatatatgtaaaaatatagtagaatttcattttgttttttttctatgctataaatgaattctcattttgcatctgctcatactccgttttatatcaataccaaagaaggaagatatctggttctaaaagccgttaaagtatgcgatgttagaactgtagaatgcgaaggaagtaaagcttcctgcgtactcaaagtagataaaccctcatcacccgcgtgtgagagaagaccttcgtccccttccagatgcgagagaatgaataacccaggaaaacaagttccgtttatgaggacggacatgctacaaaatatgttcgcggctaatcgcgataatgtagcttctagacttttgtcctaaaatacaattatatccttttcgatattaataaatccgtgtcgtccaggttttttatctctttcagtatgtgaatagataggtattttatctctattcatcatcgaatttaagagatccgataaacattgtttgtattctccagatgtcagcatctgatacaacaatatatgtgcacataaacctctggcacttatttcatgtaccttccccttatcactaaggagaatagtatttgagaaatatgtatacatgatattatcatgaattagatatacagaatttgtaacactctcgaaatcacacgatgtgtcggcgttaagatctaatatatcactcgataacacattttcatctagatacactagacattttttaaagctaaaatagtctttagtagtaacagtaactatgcgattattttcatcgatgatacatttcatcggcatattattacgcttaccatcaaagactataccatgtgtatatctaacgtattctagcatggttgccatacgcgcattaaacttttcaggatctttggatagatcttccaatctatctatttgagaaaacatttttatcatgttcaatagttgaaacgtcggatccactatatagatattatctataaagattttaggaactacgttcatggtatcctggcgaatattaaaactatcaatgatatgattatcgttttcatcttttatcaccatatagtttctaagatatgggattttacttaatataatattatttcccgtaataaattttattagaaatgccaaatctataagaaaagtcctcgaattagtttgaagaatatctatatcgccgtaccgtatatttggattaattagatatagagaatatgatccgtaacatatacaacttttattatggcgtctaagatattcttccatcaacttattaacatttttgactagggaagatacattatgacgtcccattacttttgccttgtctattactgcgacgttcatagaatttagcatatctcttgccaattcttccattgatgttacattataagaaattttagatgaaattacatttggagctttaatagtaagaactcctaatatgtccgtgtatgtggtcactaatacagattgtagttctataatcgtaaataatttacctatattatatgtttgagtctgtttagaaaagtagctaagtatacgatcttttatttctgatgcagatgtatcaacatcggaaaaaaatctttttttattcttttttactaaagatacaaatatgtctttgttaaaaacagttattttctgaatatttctagcttgtaattttaacatatgatattcgttcacactaggtactctgcctaaataggtttctataatctttaatgtaatattaggaaaagtattctgatcaggattcctattcattttgaggatttaaaactctgattattgtctaatatggtctcaacacaaactttttcacagagcgatagagtttttgataactcgtttttcttaagaaatataaaactactgtctccagagctcgctctatcttttattttatttaattcgatacaaactcctgatactggttcagaaagtaattcattaattttcagtcctttatagaagatatttaatatagataatacaaaatcttcagtttttgatatcgatctgattgatcctagaactagatatattaataacgtgctcattaggcagtttatggcagcttgataattagatatagtatattccagttcatatttattagataccgcattgcccagattttgatattctatgaattcctctgaaaataaatccaaaataactagacattctattttttgtggattagtgtactctcttccctctatcatgttcactactggtgtccacgatgataaatatctagagggaatataatatagtccataggatgccaatctagcaatgtcgaataactgtaattttattcttcgctcttcattatgaattgattcttgaggtataaacctaacacaaattatattattagacttttcgtatgtaatgtctttcatgttataagtttttaatcctggaatagaatctattttaatgaggcttttaaacgcagagttctccaacgagtcaaagcataatactctgttggttttcttatatacgatgttacgattttcttctttgaatggaataggtttttgaattagtttataattacaacataatagataaggaagtgtgcaaatagtacgcggaaaaaacataatagctcccctgttttcatccatggttttaagtaaatgatcactggcttctttagtcaatggatattcgaacattaaccgtttcatcatcattggacagaatccatatttcttaatgtaaagagtgatcaaatcattgtgtttattgtaccatcttgttgtaaatgtgtattcggttatcggatctgctcctttttctattaaagtatcgatgtcgatctcgtctaagaattcaactatatcgacatatttcatttgtatacacataaccattactaacgtagaatgtataggaagagatgtaacgggaacagggtttgttgattcgcaaactattctaatacataattcttctgttaatacgtcttgcacgtaatctattatagatgccaagatatctatataattattttgtaagatgatgttaactatgtgatctatataagtagtgtaataattcatgtatttcgatatatgttccaactctgtctttgtgatgtctagtttcgtaatatctatagcatcctcaaaaaatatattcgcatatattcccaagtcttcagttctatcttctaaaaaatcttcaacgtatggaatataataatctattttacctcttctgatatcattaatgatatagtttttgacactatcttctgtcaattgattcttattcactatatctaagaaacggatagcgtccctaggacgaactactgccattaatatctctattatagcttctggacataattcatctattataccagaattaatgggaactattccgtatctatctaacatagttttaagaaagtcagaatctaagacctgatgttcatatattggttcatacatgaaatgatctctattgatgatagtgactatttcattctctgaaaattggtaactcattctatatatgctttccttgttgatgaaggatagaatatactcaatagaatttgtaccaacaaactgttctcttatgaatcgtatatcatcatctgaaataatcatgtaaggcatacatttaacaattagagacttgtctcctgttatcaatatactattcttgtgataatttatgtgtgaggcaaatttgtccacgttctttaattttgttatagtagatatcaaatccaatggagctacagttcttggcttaaacagatatagtttttctggaacgaattctacaacattattataaaggactttgggtagataagtgggatgaaatcctattttaattaatgcgatagccttgtcctcgtgcagatatccaaacgcttttgtgatagtatggcattcattgtctagaaacgctctacgaatatctgtgacagatatcatctttagagaatatactagtcgcgttaatagtactacaatttgtattttttaatctatctcaataaaaaaattaatatgtatgattcaatgtataactaaactactaactgttattgataactagaatcagaatctaatgatgacgtaaccaagaagtttatctactgccaatttagctgcattatttttagcatctcgtttagattttccatctgccttatcgaatactcttccgtcgatatctacacaggcataaaatgtaggagagttactaggccccactgattcaatacgaaaagaccaatctctcttagttatttggcagtactcattaataatggtgacagggttagcatctttccaatcaataatttttttagccggaataacatcatcaaaagacttatgatcctctctcattgatttttcgcgggatacatcatctattatggcgtcagccataacatcagcatccggcttatccgcctccgttgtcataaaccaacgaggaggaatatcgtcggagctgtacaccatagcactacgttgaagatcgtacagagctttattaacttctcgcttctccatattaagttgtctagttagttgtgcagcagtagctccttcgattccaatgtttttaatagccgcacacacaatctctgcgtcagaacgctcgtcaatatagatcttagacatttttagagagaactaacacaaccagcaataaaactaatttattttatcatttttttattcatcatcctctggtggttcgtcgtttctatcgaatgtggatctgattaacccgtcatctataggtgatgctggttctggagattctggaggagatggattattatctggaagaatctctgttatttccttgttttcatgtatcgattgcgttgtaacattaagattgcgaaatgctctaaatttgggaggcttaaagtgttgtttgcaatctctacacgcatgtctaactagtggaggttcgtcagcggctctagtttgaatcatcatcggcgtagtattcctacttttacagttaggacacggtgtattgtatttctcgtcgagaacgttaaaataatcgttgtaactcacatcctttattttatctatattgtattctactcctttcttaatgcattttataccgaataagagatagcgaaggaattctttttcggtgccgctagtacccttaatcatatcacatagtgttttatattccaaatttgtggcaatagacggtttatttctatacgatagtttgtttctggaatcctttgagtattctataccaatattattctttgattcgaatttagtttcttcgatattagattttgtattacctatattcttgatgtagtactttgatgatttttccatggcccattctattaagtcttccaagttggcatcatccacatattgtgatagtaattctcggatatcagtagcggctaccgccattgatgtttgttcattggatgagtaactactaatgtatacattttccatttataacacttatgtattaactttgttcatttatattttttcattattatgttgatattaacaaaagtgaatatatatgttaataattgtattgtggttatacggctacaatttcataatgagtggaagtcagtgtccgatgatcaatgacgatagctttactctgaaaagaaagtatcaaatcgatagtgcggagtcaacaataaaaatggataagaagaggataaagtttcagaatagagccaaaatggtaaaagaaataaatcagacaataagagcagcacaaactcattacgagacattgaaactaggatacataaaatttaagagaatgattaggactactactctagaagatatagcaccatctattccaaataatcagaaaacttataaactattctcggacatttcagccatcggcaaagcatcacagaatccgagtaagatggtatatgctctgctgctttacatgtttcccaatttgtttggagatgatcatagattcattcgttatagaatgcatccaatgagtaaaatcaaacacaagatcttctctcctttcaaacttaatcttattagaatattagtggaagaaagattctataataatgaatgcagatctaataaatggagaataattggaacacaagttgataaaatgttgatagctgaatctgataaatatacaatagatgcaaggtataacctaaaacccatgtatagaatcaagggaaaatctgaagaagataccctctttatcaaacagatggtagaacaatgtgtgacatcccaggaattggtggaaaaagtgttgaagatactgtttagagatttgttcaagagtggagaatacaaagcgtacagatacgatgatgatgtagaaaatggatttattggattggatacactaaaattaaacattgttcatgatatagttgaaccatgtatgcctgttcgtaggccagtggctaagatactgtgtaaagaaatggtaaataaatactttgagaatccgctacatattattggtaaaaatcttcaagagtgcattgactttgttagtgaataggcatttcatctttctccaatactaattcaaattgttaaattaataatggatagtataaatagttattagtgataaaatagtaaaaataattattagaataagagtgtagtatcatagataactctcttctataaaaatggattttattcgtagaaagtatcttatatacacagtagaaaataatatagattttttaaaggatgatacattaagtaaagtaaacaattttaccctcaatcatgtactagctctcaagtatctagttagcaattttcctcaacacgttattactaaggatgtattagctaataccaatttttttgttttcatacatatggtacgatgttgtaaagtgtacgaagcggttttacgacacgcatttgatgcacccacgttgtacgttaaagcattgactaagaattatttatcgtttagtaacgcaatacaatcgtacaaggaaaccgtgcataaactaacacaagatgaaaaatttttagaggttgccgaatacatggacgaattaggagaacttataggcgtaaattatgacttagttcttaatccattatttcacggaggggaacccatcaaagatatggaaatcatttttttaaaactgtttaagaaaacagacttcaaagttgttaaaaaattaagtgttataagattacttatttgggcttacctaagcaagaaagatacaggcatagagtttgcggataatgatagacaagatatatacactctatttcaacaaactggtagaatagtccatagcaatctaacagaaacgtttagagattatatctttcccggagataagactagctattgggtgtggttaaacgaaagtatagctaatgatgcggatattgttcttaatagacacgccattaccatgtatgataaaattcttagttatatatactctgagataaaacaaggacgcgttaataaaaacatgcttaagttagtttatatctttgagcctgaaaaagatatcagagaacttctgctagaaatcatatatgatattcctggagatatcctatctattattgatgcaaaaaacgacgattggaaaaaatattttattagtttttataaagctaattttattaacggtaatacatttattagtgatagaacgtttaacgaggacttattcagagttgttgttcaaatagatcccgaatatttcgataatgaacgaattatgtctttattctctacgagtgctgcggacattaaacgatttgatgagttagatattaataacagttatatatctaatataatttatgaggtgaacgatatcacattagatacaatggatgatatgaagaagtgtcaaatctttaacgaggatacgtcgtattatgttaaggaatacaatacatacctgtttttgcacgagtcggatcccatggtcatagagaacggaatactaaagaaactgtcatctataaaatccaagagtagacggctgaacttgtttagcaaaaacattttaaaatattatttagacggacaattggctcgtctaggtcttgtgttagatgattataaaggagacttgttagttaaaatgataaaccatcttaagtctgtggaggatgtatccgcattcgttcgattttctacagataaaaaccctagtattcttccatcgctaatcaaaactattttagctagttataatatttccatcatcgtcttatttcaaaggtttttgagagataatctatatcatgtagaagaattcttggataaaagcatccatctaaccaagacggataagaaatatatacttcaattgataagacacggtagatcatagaacagaccaaatatattattaataatttgtatatacatagatataattatcacacatttttgataaatgggaactgctgcaacaattcagactcccaccaaattaatgaataaagaaaatgcagaaatgattttggaaaaaattgttgatcatatagttatgtatattagtgacgaatcaagtgattcagaaaataatcctgaatatattgattttcgtaacagatacgaagactatagatctctcattataaaaagtgatcacgagtttgtaaagctatgtaaaaatcatgcagagaaaagttctccagaaacgcaacaaatgattatcaaacacatatacgaacaatatcttattccagtatctgaagtactattaaaacctataatgtccatgggtgacataattacatataacggatgtaaagacaatgaatggatgctagaacaactctctaccctaaactttaacaatctccgcacatggaactcatgtagcataggcaatgtaacgcgtctgttttatacattttttagttatctgatgaaagataaactaaatatataagtataatcccattctaatactttaacctgatgtattacctgcatcttattagaatattaacctaactaaaagacataacatagttgataaaaagcggtaggatataaatattatggctgccaccgttccgcgttttgacgacgtgtacaaaaatgcacaaagaagaattctagatcaagaaacattttttagtagaggtctaagtagaccgttaatgaaaaacacatatctatttgataattacgcgtatggatggataccagaaactgcaatttggagtagtagatacgcaaacttagatgcaagtgactattatcccatttcgttgggattacttaaaaagttcgagtttctcatgtctctatataaaggtcctattcccgtatatgaagaaaaagtaaatactgaattcattgctaatggatcgttctctggtagatacgtatcatatcttcgaaagttttctgcccttccaacaaacgagtttattagttttttgttactgacttccattccaatctataatatcttgttctggtttaaaaatactcagtttgatattactaaacacacattattcagatacgtctatacagataatgccaaacacctggcgttggctaggtatatgcatcaaacaggagactataagcctttgtttagtcgtctcaaagagaattatatatttaccggtcccgttccaataagtatcaaagatatagatcaccctaatcttagtagagcaagaagtccatccgattatgagacattagctaatattagtactatattgtactttaccaagtatgatccggtattaatgtttttattgttttacgtacctgggtattcaattactacaaaaattactccagccgtagaatatctaatggataaactgaatctaacaaagagcgacgtacaactgttgtaaattattttatgcttcgtaaaatgtaggttttgaaccaaacattctttcaaagaatgagatgcataaaactttattatccaatagattgactatttcggacgtcaatcgtttaaagtaaacttcgtaaaatattctttgatcactgccgagtttaaaacttctatcgataattgtttcatatgttttaatatttacaagttttttggtccatggtacattagccggacaaatatatgcaaaataatatcgttctccaagttctatagtttctggattatttttattatattcagtaaccaaatacatattagggttatctgcggatttataatttgagtgatgcattcgactcaacataaataattctagaggagacgatctactatcaaattcggatcgtaaatctgtttctaaagaacggagaatatctatacatacctgattagaattcatccgtccttcagacaacatctcagacagtctggtcttgtatgtcttaatcatattcttatgaaacttggaaacatctcttctagtttcactagtacctttattaattctctcaggtacagattttgaattcgacgatgctgagtatttcatcgttgtatatttcttcttcgattgcataatcagattcttatataccgcctcaaactctattttaaaattattaaacaatactctattattaatcagtcgttctaactctttcgctatttctatagacttatcgacatcttgactgtctatctctgtaaacacggagtcggtatctccatacacgctacgaaaacgaaatctgtaatctataggcaacgatgttttcacaatcggattaatatctctatcgtccatataaaatggattacttaatggattggcaaaccgtaacataccgttagataactctgctccatttagtaccgattctagatacaagatcattctacgtcctatggatgtgcaactcttagccgaagcgtatgagtatagagcactatttctaaatcccatcagaccatatactgagttggctactatcttgtacgtatattgcatggaatcatagatggccttttcagttgaactggtagcctgttttagcatctttttatatctggctctctctgccaaaaatgttcttaatagtctaggaatggttccttctatcgatctatcgaaaattgctatttcagagatgaggttcggtagtctaggttcacaatgaaccgtaatatatctaggaggtggatatttctgaagcaagagctgattatttatttcttcttccaatctattggtactaacaacgacaccgactaatgtttccggagatagatttccaaagatacacacattaggatacagactgttataatcaaagattaatacattattactaaacattttttgttttggagcaaataccttaccgccttcataaggaaacttttgttttgtttctgatctaactaagatagttttagtttccaacaatagctttaacagtggacccttgatgactgtactcgctctatattcgaataccatggattgaggaagcacatatgttgacgcacccgcgtctgtttttgtttctactccataatactcccacaaatactgacacaaacaagcatcatgaatacagtatctagccatatctaaagctatgtttagattataatccttatacatctgagctaaatcaacgtcatcctttccgaaagataatttatatgtatcattaggtaaagtaggacatgatagtacgactttaaatccattttcccaaatatctttacgaattactttacatataatatcctcatcaacagtcacataattacctgtggttaaaacctttgcaaatgcagcggctttgcctttcgcgtccgtagtatcgtcaccgatgaacgtcatttctctaactcctctatttaatactttacccatgcaactgaacgcgttcttggatatagaatccaatttgtacgaatccaatttttcagatttttgaatgaatgaatatagatcgaaaaatatagttccattattgttattaacgtgaaacgtagtattggccatgccgcctactcccttatgactagactgatttctctcataaatacagagatgtacagcttcctttttgtccggagatctaaagataatcttctctcctgttaataactctagacgattagtaatatatctcagatcaaagttatgtccgttaaaggtaacgacgtagtcgaacgttagttccaacaattgtttagctattcgtaacaaaactatttcagaacatagaactagttctcgttcgtaatccatttccattagtgactgtatcctcaaacatcctctatcgacggcttcttgtatttcctgttccgttaacatctcttcattaatgagcgtaaacaataatcgtttaccacttaaatcgatataacagtaacttgtatgcgagattgggttaataaatacagaaggaaacttcttatcgaagtgacactctatatctagaaataagtacgatcttgggatatcgaatctaggtatttttttagcgaaacagttacgtggatcgtcacaatgataacatccattgttaatctttgtcaaatattgctcgtccaacgagtaacatccgtctggagatatcccgttagaaatataaaaccaactaatattgagaaattcatccatggtggcattttgtatgctgcgtttctttggctcttctatcaaccacatatctgcgacggagcattttctatctttaatatctagattataacttattgtctcgtcaatgtctatagttctcatctttcccaacggcctcgcattaaatggaggaggagacaatgactgatatatttcgtccgtaactacgtaataaaagtaatgaggaaatcgtataaatacggtctcgccatttcgacatctggatttcagatataaaaatctgttttcaccgtgactttcaaaccaattaatgcaccgaacatccatttatagaatttagaaatatattttcatttaaatgaatcccaaacattggggaagagccgtatggaccattatttttatagtactttcgcaagcgggtttagacggcaacatagaagcgtgtaaacgaaaactatatactatagtcagcactcttccatgtcctgcatgtagacggcacgcgactatcgctatagaggacaataatgtcatgtctagcgatgatctgaattatatttattattttttcatcagattatttaacaatttggcatctgatcccaaatacgcgatcgatgtgacaaaggttaaccctttataaacttaacccattataaaacttatgattagtcacgactgaaataaccgcgtgattattttttggtataattctacacggcatggtttctgtaactatgaattcaacccccgttacattagtgaaatctttaacaaacagcaagggttcgtcaaagacataaaactcattgtttacaatcgaaatagaccccctatcacacttaaaataaaaaatatccttatcctttaccaccaaataaaattctgattggtcaatgtgaatgtattcacttaacagttccacaaatttatttattaactccgaggcacatacatcgtcggtattttttatggcaaactttactcttccagcatccgtttctaaaaaaatattaacgagttccatttatatcatccaatattattgaaatgacgttgatggacagatgatacaaataagaaggtacggtacctttgtccaccatctcctccaattcatgctctattttgtcattaactttaatgtatgaaaacagtacgccacatgcttccatgacagtgtgtaacactttggatacaaaatgtttgacattagtataattgtccaagactgtcaatctataatagatagtagctataatatattctatgatggtattgaagaagatgacaatcttggcatattgatcatttaacacagacatggtatcaacagatagcttgaatgaaagagaatcagtaattggaataagcgtcttctcgatagagtgtccgtataccaacatgtctgatattttgatgtattccattaaattatttagttttttctttttattctcgttaaacagcatttctgtcaacggaccccaacatcgttgaccgattaagttttgattgatttttccgtgtaaggcgtatctagtcagatcgtatagcctatccaataatccatcatctgtgcgtagatcacatcgtacactttttaattctctatagaagagcgacagacagcaatttctttattctctacagatgtaagatacttgaagacattcctatgatgatgcagaattttggataacacggtattgatggtatctgttaccataattcctttgatggctgatagtgtcagagcacaagatttccaatctttgttttgatatctatatcagacagcatggtgcgtctgacaacacaaggattaagacggaaagatgaaatgattctctcaacatcttcaatggataccttgctattttttctggcattatctatatgtgcgagaatatcctctagagaatcagtatcctttttgatgatagtggatctcaatgacatgggacgtctaaaccttcttattctatcaccagattgcatggtgatttgtcttctttcttttatcataatgtaatctctaaattcatcggcaaattgtctatatctaaaatcataatatgagatgtttacctctacaaatatctgttcgtccaatgttagagtatctacatcagttttgtattccaaattaaacatggcaacggatttaattttatattcctctattaagtcctcgtcgataataacagaatgtagataatcatttaatccatcgtacatggttggaagatgcttgttgacaaaatctttaattgtcttgatgaaggtgggactatatctaacatcttgattaataaaatttataacattgtccataggatactttgtaactagttttatacacatctcttcatcggtaagtttagacagaatatcgtgaacaggtggtatattatattcatcagatatacgaagaacaatgtccaaatctatattgtttaatatattatatagatgtagcgtagctcctacaggaatatctttaactaagtcaatgatttcatcaaccgttagatctattttaaagttaatcatataggcattgatttttaaaaggtatgtagccttgactacattctcattaattaaccattccaagtcactgtgtgtaagaagattatattctatcataagcttgactacatttggtcccgataccattaaagaattcttatgatataaggaaacagattttaggtactcatctactctacaagaattttggagagccttaacgatatcagtgacgtttattatttcaggaggaaagaatctaacattgagaatatcggaattaatagcttccagatacagtgattttggcaatagtccgtgtaatccataatccagtaacacgagctggtgcttgctagacaccttttcaatgtttaatttttttgaaataagctttgataaagccttcctcgcaaattccggatacatgaacatgtcggcgacatgattaagtattgttttttcattattttctcaacaagttctcaataccccaatagatgatagaatatcacccaatgcgtccatgttgtctatttccaacaggtcgctatatccaccaatagaagtttttccaaaaaagattctaggaacagttctaccaccagtaatttgttcaaaatagtcacgcaattcattttcgggtttaaattctttaatatcgacaatttcatacgctcctcttttgaaactaaacttatttagaatatccagtgcatttctacaaaaaggacatgtatacttgacaaaaattgtcactttgttattggccaacctttgttgtacaaattcctcggccattttaatatttaagtgatataaaactatctcgacttatttaactctttagtcgagatatatggacgcagatagctatatgatagccaactacagaaggcaaacgctataaaaaacataattacgacgagcatatttataaatatttttattcagcattacttgatatagtaatattaggcacagtcaaacattcaaccactctcgatacattaactctctcattttctttaacaaattctacaatatcttcgtaaaaagattcttgaaactttttagaatatctatcgactctagatgaaatagcgttcgtcaacatactatgttttgtatacataaaggcgcccattttaacagtttctagtgacaaaatgctagcgatcctaggatcctttagaatcacatagattgacgattcgtctctcttagtaactctagtaaaataatcatacaatctagtacgcgaaataatattatccttgacttgaggagatctaaacaatctagttttgagaacatcgataagttcatcgggaatgacatacatactatctttaatagaactcttttcatccagttgaatggattcgtccttaaccaactgattaatgagatcttctattttatcattttccagatgatatgtatgtccattaaagttaaattgtgtagcgcttctttttagtctagcagccaatactttaacatcactaatatcgatatacaaaggagatgatttatctatggtattaagaattcgtttttcgacatctgtcaaaaccaattcctttttgcctgtatcatccagttttccatcctttgtaaagaaattattttctactagactattaataagactgataaggattcctccataattgcacaatccaaactttttaacaaaactagactttacaagatctacaggaatgcgtaattcaggtttcttagcttgtgattttttcttttgtggacattttcttgtgaccaactcatctaccatttcattgattttagcagtgaaataagctttcaatgcacgggcactgatactattgaaaacgagttgatcttcaaattccgccatttaagttcaccaaacaacttttaaatacaaatatatcaatagtagtagaataagaactataaaaaaaataataattaaccaataccaaccccaacaaccggtattattagttgatgtgactgttttctcatcacttagaacagatttaacaatttctataaagtctgtcaaatcatcttccggagaccccataaatacaccaaatatagcggcgtacaacttatccatttatacattgaatattggcttttctttatcgctatcttcatcatattcatcatcaatatcaacaagtcccagattacgagccagatcttcttctacattttcagtcattgatacacgttcactatctccagagagtccgataacgttagccaccacttctctatcaatgattagtttcttgagtgcgaatgtaatttttgtttccgttccggatctatagaagacgataggtgtgataattgccttggccaattgtctttctcttttactgagtgattctagttcaccttctatagatctgagaatggatgattctccagtcgaaacatattctaccatggatccgtttaatttgttgatgaagatggattcatccttaaatgttttctctgtaatagtttccaccgaaagactatgcaaagaatttggaatgcgttccttgtgcttaatgtttccatagacggcttctagaagttgatacaacataggactagccgcggtaacttttatttttagaaagtatccatcgcttctatcttgtttagatttatttttataaagtttagtctctccttccaacataataaaagtggaagtcatttgactagataaactatcagtaagttttatagagatagacgaacaattagcgtattgagaagcatttagtgtaacgtattcgatacattttgcattagatttactaatcgattttgcatactctataacacccgcacaagtctgtagagaatcgctagatgcagtaggtcttggtgaagtttcaactctcttcttgattaccttactcatgattaaacctaaataattgtactttgtaatataatgatatatattttcactttatctcatttgagaataaaaatgtttttgtttaaccactgcatgatgtacagatttcggaatcgcaaaccaccagtggttttattttatccttgtccaatgtgaattgaatgggagcggatgcgggtttcgtacgtagatagtacattcccgtttttagaccgagactccatccgtaaaaatgcatactcgttagtttggaataactcggatctgctatatggatattcatagattgactttgatcgatgaaggctcccctgtctgcagccatttttatgatcgtcttttgtggaatttcccaaatagttttataaactcgcttaatatcttctggaaggtttgtattctgaatggatccaccatctgccataatcctattcttgatctcatcattccataattttctctcggttaaaactctaaggagatgcggattaactacttgaaattctccagacaatactctccgagtgtaaatattactggtatacggttccaccgactcattatttcccaaaatttgagcagttgatgcagtcggcataggtgccaccaataaactatttctaagaccgtatgttctgattttatcttttagaggttcccaattccaaagatccgacggtacaacattccaaagatcatattgtagaataccgttactggcgtacgatcctacatatgtatcgtatggtccttccttctcagctagttcacaactcgcctctaatgcaccgtaataaatggtttcgaagatcttcttatttagatcttgtgcttccaggctatcaaatggataatttaagagaataaacgcgtccgctaatccttgaacaccaataccgataggtctatgtctcttattagagatttcagcttctggaataggataataattaatatctataattttattgagatttctgacaattactttgaccacatccttcagtttgagaaaatcaaatcgcccatctattacaaacatgttcaaggcaacagatgccagattacaaacggctacctcattagcatccgcatattgtattatctcagtgcaaagattactacacttgatagttcctaaattttgttgattactctttttgttacacgcatccttataaagaatgaatggagtaccagtttcaatctgagattctataatcgctttccagacgactcgagcctttattatagatttgtatctcctttctctttcgtatagtgtatacaatcgttcgaactcgtctccccaaacattgtccaatccaggacattcatccggacacatcaacgaccactctccgtcatccttcactcgtttcataaagagatcaggaatccaaagagctataaatagatctctggttctatgttcctcgtttcctgtattctttttaagatcgaggaacgccataatatcagaatgccacggttccaagtatatggccataactccaggccgtttgtttcctccctgatctatgtatctagcggtgttattataaactctcaacattggaataataccgtttgatataccattggtaccggagatatagcttccactggcacgaatattactaattgatagacctattccccctgccattttagagattaatgcgcatcgttttaacgtgtcatagataccctctatgctatcatcgatcatgttaagtagaaaacagctagacatttggtgacgactagttcccgcattaaataaggtaggagaagcgtgcgtaaaccatttttcagaaagtagattgtacgtctcaatagctgagtctatatcccattgatgaattcctactgcgacacgcattaacatgtgctgaggtctttcaacgatcttgttgtttattttcaacaagtaggatttttccaaagttttaaaaccaaaatagttgtatgaaaagtctcgttcgtaaataataaccgagttgagtttatccttatatttgttaactatatccatggtgatacttgaaataatcggagaatgtttcccatttttaggattaacatagttgaataaatcctccatcacttcactaaatagtttttttgtttccttgtgtagatttgatacggctattctggcggctagaatggcataatccggatgttgtgtagtacaagtggctgctatttcggctgccagagtgtccaattctaccgttgttactccattatatattccttgaataaccttcatagctattttaataggatctatatgatccgtgtttaagccataacataattttctaatacgagacgtgattttatcaaacatgacattttccttgtatccatttcgtttaatgacaaacatttttgttggtgtaataaaaaaaattatttaacttttcattaatagggatttgacgtatgtagcgtacaaaattatcgttcctggtatatagataaagagtcctatatatttgaaaatcgttacggctcgattaaactttaatgattgcatagtgaatatatcattaggatttaactccttgactatcatggcggcgccagaaattaccatcaaaagcattaatacagttatgccgatcgcagttagaacggttatagcatccaccatttatatctaaaaattagatcaaagaatatgtgacaaagtcctagttgtatactgagaattgacgaaacaatgtttcttacatattttttttttattagtaaccgacttaatagtaggaactggaaaactagacttgattattctataagtatagatacccttccaaataatattctctttgataaaagttccagaaaatgtagaattttttaaaaagttatcttttgctattaccaagattgtgtttagacgcttattattaatatgagtgatgaaatccacaccgcctctagatatcgcttttatttccacattagatggtaaatccaatagtgaaactatctttttaggaatgtatggactcgcgtttagaggagtgaacgtcttaggcgtcggaaaggggccggcctttttttctagacactaaataaatagtaagattaaattaattataaaattatgtatataatattaattataaaattatgtatatgatttactaactttagttagataaattaataatacataaattttagtatattaatattataaattaataatacataaattttagtatattaatattatattttaaatatttatttagtgtctagaaaaaaaggcctagcaggcc

SEQ ID NO: 13 - DNA, 63035 bp, Artificial Sequence
  sMVA fragment 2
ggcctagcaggcctttttttctagacactaaataaatagtaagattaaattaattataaaattatgtatataatattaattataaaattatgtatatgatttactaactttagttagataaattaataatacataaattttagtatattaatattataaattaataatacataaattttagtatattaatattatattttaaatatttatttagtgtctagaaaaaaaggccggccataaaaatgtttttgtttaaccactgcatgatgtacagatttcggaatcgcaaaccaccagtggttttattttatccttgtccaatgtgaattgaatgggagcggatgcgggtttcgtacgtagatagtacattcccgtttttagaccgagactccatccgtaaaaatgcatactcgttagtttggaataactcggatctgctatatggatattcatagattgactttgatcgatgaaggctcccctgtctgcagccatttttatgatcgtcttttgtggaatttcccaaatagttttataaactcgcttaatatcttctggaaggtttgtattctgaatggatccaccatctgccataatcctattcttgatctcatcattccataattttctctcggttaaaactctaaggagatgcggattaactacttgaaattctccagacaatactctccgagtgtaaatattactggtatacggttccaccgactcattatttcccaaaatttgagcagttgatgcagtcggcataggtgccaccaataaactatttctaagaccgtatgttctgattttatcttttagaggttcccaattccaaagatccgacggtacaacattccaaagatcatattgtagaataccgttactggcgtacgatcctacatatgtatcgtatggtccttccttctcagctagttcacaactcgcctctaatgcaccgtaataaatggtttcgaagatcttcttatttagatcttgtgcttccaggctatcaaatggataatttaagagaataaacgcgtccgctaatccttgaacaccaataccgataggtctatgtctcttattagagatttcagcttctggaataggataataattaatatctataattttattgagatttctgacaattactttgaccacatccttcagtttgagaaaatcaaatcgcccatctattacaaacatgttcaaggcaacagatgccagattacaaacggctacctcattagcatccgcatattgtattatctcagtgcaaagattactacacttgatagttcctaaattttgttgattactctttttgttacacgcatccttataaagaatgaatggagtaccagtttcaatctgagattctataatcgctttccagacgactcgagcctttattatagatttgtatctcctttctctttcgtatagtgtatacaatcgttcgaactcgtctccccaaacattgtccaatccaggacattcatccggacacatcaacgaccactctccgtcatccttcactcgtttcataaagagatcaggaatccaaagagctataaatagatctctggttctatgttcctcgtttcctgtattctttttaagatcgaggaacgccataatatcagaatgccacggttccaagtatatggccataactccaggccgtttgtttcctccctgatctatgtatctagcggtgttattataaactctcaacattggaataataccgtttgatataccattggtaccggagatatagcttccactggcacgaatattactaattgatagacctattccccctgccattttagagattaatgcgcatcgttttaacgtgtcatagataccctctatgctatcatcgatcatgttaagtagaaaacagctagacatttggtgacgactagttcccgcattaaataaggtaggagaagcgtgcgtaaaccatttttcagaaagtagattgtacgtctcaatagctgagtctatatcccattgatgaattcctactgcgacacgcattaacatgtgctgaggtctttcaacgatcttgttgtttattttcaacaagtaggatttttccaaagttttaaaaccaaaatagttgtatgaaaagtctcgttcgtaaataataaccgagttgagtttatccttatatttgttaactatatccatggtgatacttgaaataatcggagaatgtttcccatttttaggattaacatagttgaataaatcctccatcacttcactaaatagtttttttgtttccttgtgtagatttgatacggctattctggcggctagaatggcataatccggatgttgtgtagtacaagtggctgctatttcggctgccagagtgtccaattctaccgttgttactccattatatattccttgaataaccttcatagctattttaataggatctatatgatccgtgtttaagccataacataattttctaatacgagacgtgattttatcaaacatgacattttccttgtatccatttcgtttaatgacaaacatttttgttggtgtaataaaaaaaattatttaacttttcattaatagggatttgacgtatgtagcgtacaaaattatcgttcctggtatatagataaagagtcctatatatttgaaaatcgttacggctcgattaaactttaatgattgcatagtgaatatatcattaggatttaactccttgactatcatggcggcgccagaaattaccatcaaaagcattaatacagttatgccgatcgcagttagaacggttatagcatccaccatttatatctaaaaattagatcaaagaatatgtgacaaagtcctagttgtatactgagaattgacgaaacaatgtttcttacatattttttttttattagtaaccgacttaatagtaggaactggaaaactagacttgattattctataagtatagatacccttccaaataatattctctttgataaaagttccagaaaatgtagaattttttaaaaagttatcttttgctattaccaagattgtgtttagacgcttattattaatatgagtgatgaaatccacaccgcctctagatatcgcttttatttccacattagatggtaaatccaatagtgaaactatctttttaggaatgtatggactcgcgtttagaggagtgaacgtcttaggcgtcggaaaggatgattcatcaaacgaataaacaatttcacaaatggatgttaatgtattagtaggaaattttttgacgctagtggaattgaagattctaatggatgatgttctacctatttcatccgataacatgttaatttccgacaccaacggttttaatatttcgatgatatacggtagtctctctttcggacttatatagcttattccacaatacgagtcattatatactccaaaaaacaaaataactagtataaaatctgtatcgaatgggaaaaacgaaattatcgacataggtatagaatctggaacattgaacgtattaatacttaattctttttctgtggtaagtaccgataggttattgacattgtatggttttaaatattctataacttgagacttgatagatattagtgatgaattgaaaattatttttatcaccacgtgtgtttcaggatcatcgtcgacgcccgtcaaccaaccgaatggagtaaaataaatatcattaatatatgctctagatattagtatttttatcaatcctttgattatcatcttctcgtaggcgaatgattccatgatcaagagtgatttaagaacatcctccggagtattaatgggcttagtaaacagtccatcgttgcaataataaaagttatccaagttaaaggatattatgcattcgtttaaagatatcacctcatctgacggagacaattttttggtaggttttagagactttgaagctacttgtttaacaaagttattcatcgtcgtttactattctatttaattttgtagttaatttatcacatatcacattaattgactttttggtccatttttccatacgtttatattcttttaatcctgcgttatccgtttccgttatatccagggatagatcttgcaagttaaatagaatgctcttaaataatgtcattttcttatccgctaaaaatttaaagaatgtataaacctttttcagagatttgaaactcttaggtggtgtcctagtacacaatatcataaacaaactaataaacattccacattcagattccaacagctgattaacttctacattaatacagcctattttcgctccaaatgtacattcgaaaaatctgaataaaacatcgatgtcacaatttgtattatccaatacagaatgtttgtgattcgtgttaaaaccatcggagaaggaataaaaataaaaattattatagtggtggaattcagttggaatattgcctccggagtcataaaaggatactaaacattgttttttatcataaattacacatttccaatgagacaaataacaaaatccaaacattacaaatctagaggtagaacttttaattttgtctttaagtatatacgataagatatgtttattcataaacgcgtcaaatttttcatgaatcgctaaggagtttaagaatctcatgtcaaattgtcctatataatccacttcggatccataagcaaactgagagactaagttcttaatacttcgattgctcatccaggctcctctctcaggctctattttcatcttgacgacctttggattttcaccagtatgtattcctttacgtgataaatcatcgattttcaaatccatttgtgagaagtctatcgccttagatactttttcccgtagtcgaggtttaaagaaatacgctaacggtatactagtaggtaactcaaagacatcatatatagaatggtaacgcgtctttaactcgtcggttaactctttcttttgatcgagttcgtcgctactattgggtctgctcaggtgccccgactctactagttccaacatcataccgataggaatacaagacactttgccggcggttgtagatttatcatatttctccactacatatccgttacaatttgttaaaaatttagatacatctatattgctacataatccagctagtgaatatatatgacataataaattggtaaatcctagttctggtattttactaattactaaatctgtatatctttccatttatcatggaaaagaatttaccagatatcttcttttttccaaactgcgttaatgtattctcttacaaatattcacaagatgaattcagtaatatgagtaaaacggaacgtgatagtttctcattggcggtgtttccagttataaaacatagatggcataacgcacacgttgtaaaacataaaggaatatacaaagttagtacagaagcacgtggaaaaaaagtatctcctccatcactaggaaaacccgcacacataaacctaaccgcgaagcaatatatatacagtgaacacacaataagctttgaatgttatagttttctaaaatgtataacaaatacagaaatcaattcgttcgatgagtatatattaagaggactattagaagctggtaatagtttacagatattttccaattccgtaggtaaacgaacagatactataggtgtactagggaataagtatccatttagcaaaattccattggcctcattaactcctaaagcacaacgagagatattttcagcgtggatttctcatagacctgtagttttaactggaggaactggagtgggtaagacgtcacaggtacccaagttattgctttggtttaattatttatttggtggattctctactctagataaaatcactgactttcacgaaagaccagtcattctatctcttcctaggatagctttagttagattgcatagcaataccattttaaaatcattgggatttaaggtactagatggatctcctatttctttacggtacggatctataccggaagaattaataaacaaacaaccaaaaaaatatggaattgtattttctacccataagttatctctaacaaaactatttagttatggcactcttattatagacgaagttcatgagcatgatcaaataggagatattattatagcagtagcgagaaagcatcatacgaaaatagattctatgtttttaatgactgccacgttagaggatgacagggaacggctaaaagtatttttacctaatcccgcatttatacatattcctggagatacactgtttaaaattagcgaggtatttattcataataagataaatccatcttccagaatggcatacatagaagaagaaaagagaaatttagttactgctatacagatgtatactcctcctgatggatcatccggtatagtctttgtggcatccgttgcacagtgtcacgaatataaatcatatttagaaaaaagattaccgtatgatatgtatattattcatggtaaggtcttagatatagacgaaatattagaaaaagtgtattcatcacctaatgtatcgataattatttctactccttatttggaatccagcgttactatacgcaatgttacacacatttatgatatgggtagagtttttgtccccgctccttttggaggatcgcaagaatttatttctaaatctatgagagatcaacgaaaaggaagagtaggaagagttaatcctgggacatacgtatatttctatgatctgtcttatatgaagtctatacagcgaatagattcagaatttctacataattatatattgtacgctaataagtttaatctaacactccccgaagatttgtttataatccctacaaatttggatattctatggcgtacaaaggaatatatagactcgttcgatattagtacagaaacatggaataaattattatccaattattatatgaagatgatagagtatgctaaactttatgtactaagtcctattctcgctgaggagttggataattttgagaggacgggagaattaactagtattgtacaagaagccattttatctctaaatttacgaattaagattttaaattttaaacataaagatgatgatacgtatatacacttttgtaaaatattattcggtgtctataacggaacaaacgctactatatattatcatagacctctaacgggatatatgaatatgatttcagatactatatttgttcctgtagataataactaaaaatcaaactctaatgaccacatctttttttagagatgaaaaattttccacatctccttttgtagacacgactaaacattttgcagaaaaaagtttattagtgtttagataatcgtatacttcatcagtgtagatagtaaatgtgaacagataaaaggtattcttgctcaatagattggtaaattccatagaatatattaatcctttcttcttgagatcccacatcatttcaaccagagacgttttatccaatgatttacctcgtactataccacatacaaaactagattttgcagtgacgtcgtatctggtattcctaccaaacaaaattttacttttagttcttttagaaaattctaaggtagaatctctatttgccaatatgtcatctatggaattaccactagcaaaaaatgatagaaatatatattgatacatcgcagctggttttgatctactatactttaaaaacgaatcagattccataattgcctgtatatcatcagctgaaaaactatgttttacacgtattccttcggcatttctttttaatgatatatcttgtttagacaatgataaagttatcatgtccatgagagacgcgtctccgtatcgtataaatatttcattagatgttagacgcttcattaggggtatacttctataaggtttcttaatcagtccatcattggttgcgtcaagaactactatcggatgttgttgggtatctctagtgttacacatggccttactaaagtttgggtaaataactatgatatctctattaattatagatgcatatatttcatttgtcaaggatattagtatcgacttgctatcgtcattaatacgtgtaatgtaatcatataaatcatgcgatagccaaggaaaatttaaatagatgttcatcatataatcgtcgctataattcatattaatacgttgacattgactaatttgtaatatagcctcgccacgaagaaagctctcgtattcagtttcatcgataaaggataccgttaaatataactggttgccgatagtctcatagtctattaagtggtaagtttcgtacaaatacagaatccctaaaatattatctaatgttggattaatctttaccataactgtataaaatggagacggagtcataactattttaccgtttgtacttactggaatagacgaaggaataatctccggacatgctggtaaagacccaaatgtctgtttgaagaaatccaatgttccaggtcctaatctcttaacaaaaattacgatattcgatcccgatatcctttgcattctatttaccagcatatcacgaactatattaagattatctatcatgtctattctcccaccgttatataaatcgcctccgctaagaaacgttagtatatccatacaatggaatacttcatttctaaaatagtattcgttttctaattctttaatgtgaaatcgtatactagaaagggaaaaattatctttgagttttccgttagaaaagaaccacgaaactaatgttctgattgcgtccgattccgttgctgaattaatggatttacaccaaaaactcatataacttctagatgtagaagcattcgctaaaaaattagtagaatcaaaggatataagtagatgttccaacaagtgagcaattcccaagatttcatctatatcattctcgaatccgaaattagaaattcccaagtagatatcctttttcatccgatcgttgatgaaaatacgaactttattcggtaagacaatcatttactaaggagtaaaataggaagtaatgttcgtatgtcgttatcatcgtataaattaaaggtgtgttttttaccattaagtgacattataattttaccaatattggaattataatataggtgtatttgcgcactcgcgacggttgatgcatcggtaaatatagctgtatctaatgttctagtcggtatttcatcatttcgctgtctaataatagcgttttctctatctgtttccattacagctgcctgaagtttattggtcggataatatgtaaaataataagaaatacatacgaataacaaaaataaaataagatataataaagatgccatttagagatctaattttgtttaacttgtccaaattcctacttacagaagatgaggaatcgttggagatagtgtcttccttatgtagaggatttgaaatatcttatgatgacttgataacttactttccagataggaaataccataaatatatttctaaagtatttgaacatgtagatttatcggaggaattaagtatggaattccatgatacaactctgagagatttagtctatcttagattgtacaagtattccaagtgtatacggccgtgttataaattaggagataatctaaaaggcatagttgttataaaggacaggaatatttatattagagaagcaaatgatgacttgatagaatatctcctcaaggaatacactcctcagatttatacatattctaatgagcgcgtccccataactggttcaaaattaattctttgtggattttctcaagttacatttatggcgtatacaacgtcgcatataacaacaaataaaaaggtagatgttctcgtttccaaaaaatgtatagatgaactagtcgatccaataaattatcaaatacttcaaaatttatttgataaaggaagcggaacaataaacaaaatactcaggaagatattttattcggtaaccggtggccaaactccataatttgctttttctatttcggattttagaatttccaaattcaccagcgatttatcggttttggtgaaatccaaggatttattaatgtccacaaatgccatttgttttgtctgtggattgtatttgaaaatggaaacgatgtagttagatagatgcgctgcaaagtttcctattagggttccgcgctttacgtcacccagcatacttgaatcaccatcctttaaaaaaaatgataagatatcaacatggagtatatcatactcggattttaattcttctactgcatcactgacattttcacaaatactacaatacggtttaccgaaaataatcagtacgttcttcatttatgggtatcaaaaacttaaaatcgttactgctggaaaataaatcactgacgatattagatgataatttatacaaagtatacaatggaatatttgtggatacaatgagtatttatatagccgtcgccaattgtgtcagaaacttagaagagttaactacggtattcataaaatacgtaaacggatgggtaaaaaagggagggcatgtaaccctttttatcgatagaggaagtataaaaattaaacaagacgttagagacaagagacgtaaatattctaaattaaccaaggacagaaaaatgctagaattagaaaagtgtacatccgaaatacaaaatgttaccggatttatggaagaagaaataaaggcagaaatgcaattaaaaatcgataaactcacatttcaaatatatttatctgattctgataacataaaaatatcattgaatgagatactaacacatttcaacaataatgagaatgttacattattttattgtgatgaacgagacgcagaattcgttatgtgtctcgaggctaaaacacatttctctaccacaggagaatggccgttgataataagtaccgatcaggatactatgctatttgcatctactgataatcatcctaagatgataaaaaacttaactcaactgtttaaatttgttccctcggcagaggataactatttagcaaaattaacggcgttagtgaatggatgtgatttctttcctggactctatggggcatctataacacccaccaacttaaacaaaatacaattgtttagtgattttacaatcgataatatagtcactagtttggcaattaaaaattattatagaaagactaactctaccgtagacgtgcgtaatattgttacgtttataaacgattacgctaatttagacgatgtctactcgtatgttcctccttgtcaatgcactgttcaagaatttatattttccgcattagatgaaaaatggaacaattttaaatcatcttatttagagaccgttccgttaccctgccaattaatgtatgcattagaaccacgcaaggagattgatgtttcagaagttaaaactttatcatcttatatagatttcgaaaatactaaatcagatatcgatgttataaaatctatatcttcgatcttcggatattctaacgaaaactgtaacactatagtgttcggcatctataaggataatttactactgagtataaatagttcattttactttaacgatagtctgttaataaccaatactaaaagtgataatataataaatataggttactagattaaaaatggtgttccaactcgtgtgctctacgtgcggcaaagatatttctcacgaacgatataaattgattatacgaaaaaaatcattaaaggatgtactcgtcagtgtaaagaacgaatgttgtaggttaaaattatctacacaaatagaacctcaacgtaacttaacagtgcaacctctattggatataaactaatatggatccggttaattttatcaagacatatgcgcctagaggttctattatttttattaattataccatgtcattaacaagtcatttgaatccatcgatagaaaaacatgtgggtatttattatggtacgttattatcggaacacttggtagttgaatctacctatagaaaaggagttcgaatagtcccattggatagtttttttgaaggatatcttagtgcaaaagtatacatgttagagaatattcaagttatgaaaatagcagctgatacgtcattaactttattgggtattccgtatggatttggtcataatagaatgtattgttttaaattggtagctgaatgttataaaaatgccggtattgatacatcgtctaaacgaatattaggtaaagatatttttctgagccaaaacttcacagatgataatagatggataaagatatatgattctaataatttaacattttggcaaattgattaccttaaagggtgagttaatatgcataactactcctccgttgttttttccctcgttctttttcttaacgttgtttgccatcactctcataatgtaaagatattctaaaatggtaaacttttgcatatcggacgcagaaattggtataaatgttgtaattgtattatttcccgtcaatggactagtcacagctccatcagttttatatcctttagagtatttctcactcgtgtctaacattctagagcattccatgatctgtttatcgttgatattggccggaaagatagattttttattttttattatattactattggcaattgtagatataacttctggtaaatatttttctaccttttcaatctcttctattttcaagccggctatatattctgctatattgttgctagtatcaataccttttctggctaagaagtcatatgtggtattcactatatcagttttaactggtagttccattagcctttccacttctgcagaataatcagaaattggttctttaccagaaaatccagctactataataggctcaccgatgatcattggcaaaatcctatattgtaccagattaatgagagcatatttcatttccaataattctgctagttcttgagacattgatttatttgatgaatctagttggttctctagatactctaccatttctgccgcatacaataacttgttagataaaatcagggttatcaaagtgtttagcgtggctagaatagtgggcttgcatgtattaaagaatgcggtagtatgagtaaaccgttttaacgaattatatagtctccagaaatctgtggcgttacatacatgagccgaatgacatcgaagattgtccaatatttttaatagctgctctttgtccattatttctatatttgactcgcaacaattgtagataccattaatcactgattcctttttcgatgccggacaatagcacaattgtttagctttggactctatgtattcagaattaatagatatatctctcaatacagattgcactatacattttgaaactatgtcaaaaattgtagaacgacgctgttctgcagccatttaactttaaataatttacaaaaatttaaaatgagcatccgtataaaaatcgataaactgcgccaaattgtggcatatttttcagagttcagtgaagaagtatctataaatgtagactcgacggatgagttaatgtatatttttgccgccttgggcggatctgtaaacatttgggccattatacctctcagtgcatcagtgttctaccgcggagccgaaaacattgtgtttaatcttcctgtgtccaaggtaaaatcgtgtttgtgtagttttcacaatgatgccatcatagatatagaacctgatctggaaaataatctagtaaaactttctagttatcatgtagtaagtgtcgattgtaacaaggaactgatgcctattaggacagatactactatttgtctaagtatagatcaaaagaaatcttacgtgtttaattttcacaagtatgaagaaaaatgttgtggtagaaccgtcattcatttagaatggttgttgggctttatcaagtgtattagtcagcatcagcatttggctattatgtttaaagatgacaatattattatgaagactcctggtaatactgatgcgttttccagggaatattctatgactgaatgttctcaagaactacaaaagttttctttcaaaatagctatctcgtctctcaacaaactacgaggattcaaaaagagagtcaatgtttttgaaactagaatcgtaatggataatgacgataacattctaggaatgttgttttcggatagagttcaatcctttaagatcaacatctttatgacgtttttagattaatactttcaatgagataaatatgggtggcagagtaagtgttgagctccctaaacgggatccgcctccgggagtacccactgatgagatgttattaaacgtggataaaatgcatgacgtgatagctcccgctaagcttttagaatatgtgcatataggaccactagcaaaagataaagaggataaagtaaagaaaagatatccagagtttagattagtcaacacaggacccggtggtctttcggcattgttaagacaatcgtataatggaaccgcacccaattgctgtcgcacttttaatcgtactcattattggaaaaaggatggaaagatatcagataagtatgaagagggtgcagtattagaatcgtgttggccagacgttcacgacactggaaaatgcgatgttgatttattcgactggtgtcagggggatacgttcgatagaaacatatgccatcagtggatcggttcagcctttaataggagtgatagaactgtagagggtcaacaatcgttaataaatctgtataataagatgcaaacattatgtagtaaagatgctagtgtaccaatatgtgaatcatttttgcatcatttacgcgcacacaatacagaagatagcaaagagatgatcgattatattctaagacaacagtctgcggactttaaacagaaatatatgagatgtagttatcccactagagataagttagaagagtcattaaaatatgcggaacctcgagaatgttgggatccagagtgttcgaatgccaatgttaatttcttactaacacgtaattataataatttaggactttgcaatattgtacgatgtaatactagcgtgaacaacttacagatggataaaacttcctcattaagattgtcatgtggattaagcaatagtgatagattttctactgttcccgtcaatagagcaaaagtagttcaacataatattaaacattcgttcgacctaaaattgcatttgatcagtttattatctctcttggtaatatggatactaattgtagctatttaaatgggtgccgcggcaagcatacagacgacggtgaatacactcagcgaacgtatctcgtctaaattagaacaagaagcgaacgctagtgctcaaacaaaatgtgatatagaaatcggaaatttttatatccgacaaaaccatggatgtaacctcactgttaaaaatatgtgctctgcggacgcggatgctcagttggatgctgtgttatcagccgctacagaaacatatagtggattaacaccggaacaaaaagcatacgtaccagctatgtttactgctgcgttaaacattcagacgagtgtaaacactgttgttagagattttgaaaattatgtgaaacagacttgtaattctagcgcggtcgtcgataacaaattaaagatacaaaacgtaatcatagatgaatgttacggagccccaggatctccaacaaatttggaatttattaatacaggatctagcaaaggaaattgtgccattaaagcgttgatgcaattgacgactaaggccactactcaaatagcacctagacaagttgctggtacaggagttcagttttatatgattgttatcggtgttataatattggcagcgttgtttatgtactatgccaagcgtatgttgttcacatccaccaatgataaaatcaaacttattttagccaataaggaaaacgtccattggactacttacatggacacattctttagaacttctccgatggttattgctaccacggatatgcaaaactgaaaatatattgataatattttaatagattaacatggaagttatcgctgatcgtctagacgatatagtgaaacaaaatatagcggatgaaaaatttgtagattttgttatacacggtctagagcatcaatgtcctgctatacttcgaccattaattaggttgtttattgatatactattatttgttatagtaatttatatttttacggtacgtctagtaagtagaaattatcaaatgttgttggcgttggtggcgctagtcatcacattaactattttttattactttatactataatagtactagactgacttctaacaaacatctcacctgccataaataaatgcttgatattaaagtcttctatttctaacactattccatctgtggaaaataatactctgacattatcgctaattgacacatcggtgagtgatatgcctataaagtaataatcttctttgggcacatataccagtgtaccaggttctaacaacctatttactggtgctcctgtagcatactttttctttaccttgagaatatccatcgtttgcttggtcaatagcgatatgtgattttttatcaaccactcaaaaaagtaattggagtgttcatatcctctacgggctattgtctcatggccgtgtatgaaatttaagtaacacgactgtggtagatttgttctatagagccggttgccgcaaatagatagaactaccaatatgtctgtacaaatgttaaacattaattgattaacagaaaaaacaatgttcgttctgggaatagaaaccagatcaaaacaaaattcgttagaatatatgccacgtttatacatggaatataaaataactacagtttgaaaaataacagtatcatttaaacatttaacttgcggggttaatttcacaactttactgtttttaaactgttcaaaatatagcatcgatccatgagaaatacgtttagccgcctttaatagaggaaatcccaccgcctttctggatctcaccaacgacgatagttctgaccagcaacttatttcttcatcatccacctgttttaacatataataggcaggagatagatatccgtcattgcaatattccttttcgtaggcacacaatctaatattgataaaatctccattctcttctctgcatttattatcttgtttcggtggctgattaggctgtagtcttggtttaggctttggtatatcgttgttgaatctattttggtcattaaatctttcatttcttcctggtatatttctatcacctcgtttggttggatttttgtctatattatcgtttgtaacatcggtacgggtattcatttatcacaaaaaaaacttctctaaatgagtctactgctagaaaacctcatcgaagaagataccatattttttgcaggaagtatatctgagtatgatgatttacaaatggttattgccggcgcaaaatccaaatttccaagatctatgctttctatttttaatatagtacctagaacgatgtcaaaatatgagttggagttgattcataacgagaatatcacaggggcaatgtttaccacaatgtataatataagaaacaatttgggtctaggagatgataaactaactattgaagccattgaaaactatttcttggatcctaacaatgaggttatgcctcttatcattaataatacggatatgactgccgtcattcctaaaaaaagtggtaggagaaagaataagaacatggttattttccgtcaaggatcatcacctatcttgtgtattttcgaaactcgtaaaaagattaatatttataaagaaaatatggaatccgcgtcgactgagtatacacctatcggagacaacaaggctttgatatctaaatatgcgggaattaatgtcctgaatgtgtattctccttccacatccatgagattgaatgccatttacggattcaccaataaaaataaactagagaaacttagtactaataaggaactagaatcgtatagttctagccctcttcaagaacccattaggttaaatgattttctgggactattggaatgtgttaaaaagaatattcctctaacagatattccgacaaaggattgattactataaatggagaatgttcctaatgtatactttaatcctgtgtttatagagcccacgtttaaacattctttattaagtgtttataaacacagattaatagttttatttgaagtattcattgtattcattctaatatatgtattttttagatctgaattaaatatgttcttcatgcctaaacgaaaaatacccgatcctattgatagattacgacgtgctaatctagcgtgtgaagacgataaattaatgatctatggattaccatggatgacaactcaaacatctgcgttatcaataaatagtaaaccgatagtgtataaagattgtgcaaagcttttgcgatcaataaatggatcacaaccagtatctcttaacgatgttcttcgcagatgatgattcattttttaagtatttggctagtcaagatgatgaatcttcattatctgatatattgcaaatcactcaatatctagactttctgttattattattgatccaatcaaaaaataaattagaagccgtgggtcattgttatgaatctctttcagaggaatacagacaattgacaaaattcacagactttcaagattttaaaaaactgtttaacaaggtccctattgttacagatggaagggtcaaacttaataaaggatatttgttcgactttgtgattagtttgatgcgattcaaaaaagaatcctctctagctaccaccgcaatagatcctattagatacatagatcctcgtcgcgatatcgcattttctaacgtgatggatatattaaagtcgaataaagtgaacaataattaattctttattgtcatcatgaacggcggacatattcagttgataatcggccccatgttttcaggtaaaagtacagaattaattagacgagttagacgttatcaaatagctcaatataaatgcgtgactataaaatattctaacgataatagatacggaacgggactatggacgcatgataagaataattttgaagcattggaagcaactaaactatgtgatgtcttggaatcaattacagatttctccgtgataggtatcgatgaaggacagttctttccagacattgttgaattctgtgagcgtatggcaaacgaaggaaaaatagttatagtagccgcactcgatgggacatttcaacgtaaaccgtttaataatattttgaatcttattccattatctgaaatggtggtaaaactaactgctgtgtgtatgaaatgctttaaggaggcttccttttctaaacgattgggtgaggaaaccgagatagagataataggaggtaatgatatgtatcaatcggtgtgtagaaagtgttacgtcggctcataatattatattttttatctaaaaaactaaaaataaacattgattaaattttaatataatacttaaaaatggatgttgtgtcgttagataaaccgtttatgtattttgaggaaattgataatgagttagattacgaaccagaaagtgcaaatgaggtcgcaaaaaaactgccgtatcaaggacagttaaaactattactaggagaattattttttcttagtaagttacagcgacacggtatattagatggtgccaccgtagtgtatataggatctgctcccggtacacatatacgttatttgagagatcatttctataatttaggagtgatcatcaaatggatgctaattgacggccgccatcatgatcctattttaaatggattgcgtgatgtgactctagtgactcggttcgttgatgaggaatatctacgatccatcaaaaaacaactgcatccttctaagattattttaatttctgatgtgagatccaaacgaggaggaaatgaacctagtacggcggatttactaagtaattacgctctacaaaatgtcatgattagtattttaaaccccgtggcgtctagtcttaaatggagatgcccgtttccagatcaatggatcaaggacttttatatcccacacggtaataaaatgttacaaccttttgctccttcatattcagctgaaatgagattattaagtatttataccggtgagaacatgagactgactcgagttaccaaatcagacgctgtaaattatgaaaaaaagatgtactaccttaataagatcgtccgtaacaaagtagttgttaactttgattatcctaatcaggaatatgactattttcacatgtactttatgctgaggaccgtgtactgcaataaaacatttcctactactaaagcaaaggtactatttctacaacaatctatatttcgtttcttaaatattccaacaacatcaactgaaaaagttagtcatgaaccaatacaacgtaaaatatctagcaaaaattctatgtctaaaaacagaaatagcaagagatccgtacgcagtaataaatagaaacgtactactgagatatactaccgatatagagtataatgatttagttactttaataaccgttagacataaaattgattctatgaaaactgtgtttcaggtatttaacgaatcatccataaattatactccggttgatgatgattatggagaaccaatcattataacatcgtatcttcaaaaaggtcataacaagtttcctgtaaattttctatacatagatgtggtaatatctgacttatttcctagctttgttagactagatactacagaaactaatatagttaatagtgtactacaaacaggcgatggtaaaaagactcttcgtcttcccaaaatgttagagacggaaatagttgtcaagattctctaccgtcctaatataccattaaaaattgttagatttttccgcaataacatggtaactggagtagagatagccgatagatctgttatttcagtcgctgattaatcaattagtagagatgagataagaacattataataatcaataatatattttatatcttatatcttgtttagaaaaatgctaatattaaaatagctaacgctagtaatccaatcggaagccatttgatatctataatagggtatctaatttcctgattcagatagcggacagctatattctcggtagctactcgtttggaatcacaaacattatttacatctaatttactatctgtaatggaaacgtttcccaatgaaatggtacaatccgatacattgcattttgttatatttttttttaaagaggctggtaacaacgcatcgcttcgtttacatggctcgtaccaacaataatagggtaatcttgtatctattcctatccgtactatgcttttatcaggataaatacatttacatcgtatatcgtctttgttagcatcacagaatgcataaatttgttcgtccgtcatgataaaaatttaaagtgtaaatataactattattttatagttgtaataaaaagggaaatttgattgtatactttcggttctttaaaagaaactgacttgataaaaatggctgtaatctctaaggttacgtatagtctatatgatcaaaaagagattaatgctacagatattatcattagtcatgttaaaaatgacgacgatatcggtaccgttaaagatggtagactaggtgctatggatggggcattatgtaaaacttgtgggaaaacggaattggaatgtttcggtcactggggtaaagtaagtatttataaaactcatatagttaagcctgaatttatttcagaaattattcgtttactgaattatatatgtattcactgcggattattgcgttcacgagaaccgtattccgacgatattaacctaaaagagttatcgggacacgctcttaggagattaaaggataaaatattatccaagaaaaagtcatgttggaacagtgaatgtatgcaaccgtatcaaaaaattactttttcaaagaaaaaggtttgtttcgtcaacaagttggatgatattaacgttcctaattctctcatctatcaaaagttaatttctattcatgaaaagttttggccattattagaaattcatcaatatccagctaacttattttatacagactactttcccatccctccgttgattattagaccggctattagtttttggatagatagtatacccaaagaaaccaatgaattaacttacttattaggtatgatcgttaagaattgtaacttgaatgctgatgaacaggttatccagaaggcggtaatagaatacgatgatattaaaattatttctaataacacttccagtatcaatttatcatatatcacatccggcaaaaataatatgattagaagttatatcgtcgcccggcgaaaagatcagaccgctagatctgtaattggtcccagtacatctatcaccgttaatgaggtaggaatgcccgcatatattagaaatacacttacagaaaagatatttgttaatgcctttacagtggataaagttaaacaactattagcgtcaaaccaagttaaattttactttaataaacgattaaaccaattaacaagaatacgccaaggaaagtttatcaaaaataaaatacatttattgcctggtgattgggtagaagtagctgttcaagaatatacaagtattatttttggaagacagccgtctctacatagatacaacgtcatcgcttcatctatcagagctaccgaaggagatactatcaaaatatctcccggaattgtcaactctcaaaatgctgatttcgacggagatgaagaatggatgatattggagcaaaatcctaaagccgtaattgaacaaagtattcttatgtatccgacgacgttactcaaacacgatattcatggagcccccgtttatggatctattcaagatgaaatcgtagcagcgtattcattgtttaggatacaagatctttgtttagatgaagtattgaacatcttggggaaatatggaagagagttcgatcctaaaggtaaatgtaaattcagcggtaaagatatctatacttacttgataggtgaaaagattaattatccgggtctcttaaaggatggtgaaattattgcaaacgacgtagatagtaattttgttgtggctatgaggcatctgtcattggctggactcttatccgatcataagtcgaacgtggaaggtatcaactttattatcaagtcatcttatgtttttaagagatatctatctatttacggttttggggtgacattcaaagatctgagaccaaattcgacgttcactaataaattggaggccatcaacgtagaaaaaatagaacttatcaaagaagcatacgccaaatatctcaacgatgtaagagacgggaaaatagttccattatctaaagctttagaggcggactatgtggaatccatgttatccaacttgacaaatcttaatatccgagagatagaagaacatatgagacaaacgctgatagatgatccagataataacctcctgaaaatggccaaagcgggttataaagtaaatcccacagaactaatgtatattctaggtacttatggacaacagaggattgatggtgaaccagcagagactcgagtattgggtagagtcttaccttactatcttccagactctaaggatccagaaggaagaggttacattcttaattctttaacaaaaggattaacgggttctcaatattacttttcgatgctggttgcaagatctcaatctactgatatcgtctgtgaaacatcacgtaccggaacactggctagaaaaatcattaaaaagatggaggatatggtggtcgacggatacggacaagtagttataggtaatacgctcatcaagtacgccgccaattataccaaaattctaggctcagtatgtaaacctgtagatcttatctatccagatgagtccatgacttggtatttggaaattagtgctctgtggaataaaataaaacagggattcgtttactctcagaaacagaaacttgcaaaaaagacattggcgccgtttaatttcctagtattcgtcaaacccaccactgaggataatgctattaaggttaaggatctgtacgatatgattcataacgtcattgatgatgtgagagagaaatacttctttacggtatctaatatagattttatggagtatatattcttgacgcatcttaatccttctagaattagaattacaaaagaaacggctatcactatctttgaaaagttctatgaaaaactcaattatactctaggtggtggaactcctattggaattatttctgcacaggtattgtctgagaagtttacacaacaagccctgtccagttttcacactactgaaaaaagtggtgccgtcaaacaaaaacttggtttcaacgagtttaataacttgactaatttgagtaagaataagaccgaaattatcactctggtatccgatgatatctctaaacttcaatctgttaagattaatttcgaatttgtatgtttgggagaattaaatccaaacatcactcttcgaaaagaaacagataggtatgtagtagatataatagtcaatagattatacatcaagagagcagaaattaccgaattagtcgtcgaatatatgattgaacgattcatctcctttagcgtcattgtaaaggaatggggtatggaaacattcattgaggatgaggataatattagatttactgtctacctaaatttcgttgaaccggaagaattgaatcttagtaagtttatgatggttcttccgggtgccgccaacaagggcaagattagtaaattcaagattcctatctctgattatacgggatatgacgacttcaatcaaacaaaaaagctcaataagatgactgtagaactcatgaatctaaaagaattgggttctttcgatttggaaaacgtcaacgtgtatcctggagtatggaatacatacgatatcttcggtatcgaggccgctcgtgaatacttgtgcgaagccatgttaaacacctatggagaagggttcgattatctgtatcagccttgtgatcttctcgctagtttactatgtgctagttacgaaccagaatcagtgaataaattcaagttcggcgcagctagtactcttaagagagctacgttcggagacaataaagcattgttaaacgcggctcttcataaaaagtcagaacctattaacgataatagtagctgccacttttttagcaaggtccctaatataggaactggatattacaaatactttatcgacttgggtcttctcatgagaatggaaaggaaactatctgataagatatcttctcaaaagatcaaggaaatggaagaaacagaagacttttaattcttatcaataacatatttttctatgatctgtcttttaaacgatggattttccacaaatgcgcctctcaagtccctcatagaatgatacacgtataaaaaatatagcataggcaatgactccttatttttagacattagatatgccaaaatcatagccccgcttctatttactcccgcagcacaatgaaccaacacgggctcgtttcgttgatcacatttagataaaaaggcggttacgtcgtcaaaatatttactaatatcggtagttgtatcatctaccaacggtatatgaataatattaatattagagttaggtaatgtatatttatccatcgtcaaatttaaaacatatttgaacttaacttcagatgatggtgcatccatagcatttttataatttcccaaatacacattattggttactcttgtcattatagtgggagatttggctttgtgcatatctccagttgaacgtagtagtaagtatttatacaaacttttcttatccatttataacgtacaaatggataaaactactttatcggtaaacgcgtgtaatttagaatacgttagagaaaaggctatagtaggcgtacaagcagccaaaacatcaacacttatattctttgttattatattggcaattagtgcgctattactctggtttcagacgtctgataatccagtctttaatgaattaacgagatatatgcgaattaaaaatacggttaacgattggaaatcattaacggatagcaaaacaaaattagaaagtgatagaggtagacttctagccgctggtaaggatgatatattcgaattcaaatgtgtggatttcggcgcctattttatagctatgcgattggataagaaaacatatctgccgcaagctattaggcgaggtactggagacgcgtggatggttaaaaaggcggcaaaggtcgatccatctgctcaacaattttgtcagtatttgataaaacacaagtctaataatgttattacttgtggtaatgagatgttaaatgaattaggttatagcggttattttatgtcaccgcattggtgttccgattttagtaatatggaatagtgttagataaatgcggtaacgaatgttcctgtaaggaaccataacagcttagatttaacgttaaagatgagcataaacataataaacaaaattacaatcaaacctataacattaatatcaaacaatccaaaaaatgaaatcagtggagtagtaaacgcgtacataactcctggataacgtttagcagctgccgttcctattctagaccaaaaattcggtttcatgttttcgaaacggtattctgcaacaagtcgaggatcgtgttctacatatttggcggcgttatccagtatctgcctattgatcttcatttcgttttcgattctggctatttcaaaataaaatcccgatgatagacctccagactttataatttcatctacgatgttcagcgccgtagtaactctaataatataggctgataagctaacatcataccctcctgtatatgtgaatatggcatgatttttgtccattacaagctcggttttaactttattgcctgtaataatttctctcatctgtaggatatctatttttttgtcatgcattgccttcaagacgggacgaagaaacgtaatatcctcaataacgttatcgttttctacaataactacatattctacctttttattttctaactcggtaaaaaaattagaatcccatagggctaaatgtctagcgatatttcttttcgtttcctctgtacacatagtgttacaaaaccctgaaaagaagtgagtatacttgtcatcatttctaatgtttcctccagtccactgtataaacgcataatccttgtaatgatctggatcatccttgactaccacaacatttcttttttctggcataacttcattgtcctttacatcatcgaacttctgatcattaatatgctcatgaacattaggaaatgtttctgatggaggtctatcaataactggcacaacaataacaggagttttcaccgccgccatttagttattgaaattaatcatatacaactctttaatacgagttatattttcgtctatccattgtttcacatttacatatttcgacaaaaagatataaaatgcgtattccaatgcttctctgtttaatgaattactaaaatatacaaacacgtcactgtctggcaataaatgatatcttagaatattgtaacaatttattttgtattgcacatgttcgtgatctatgagttcttcttcgaatggcataggatctccgaatctgaaaacgtataaataggagttagaataataatatttgagagtattggtaatatataaactctttagcggtataattagtttttttctctcgatttctatttttagatgtgatggaaaaatgactaattttgtagcattagtatcatgaactctaatcgagatcttaatatcttcgtcacacgttagttctttgaagtttttaagagatgcatcagttggttcgaccgatggagtaggtgcaacaattttttgttcgatgtatgtatgtactggagccattgtcttaactataatggtgcttgtatcgaaaaactttaatgcagataatggaagctcttcgccgcgactttctacatcgtaattgggttctaacgccgatctctgaatggatactagttttctaagttctaatgtgattctctgaaaatgtaaatccaattcctccggcattatagatgtgtatacatcggtaaataaaactatagtatccaacgatcccttctcgcaaattctagtcttaaccaaaaaatcgtatataaccacggagatggcgtatttaagagtggattcttctaccgttttgttcttggatttcatataagaaactataaagtccgcactactgttaagaatgattactaacgcaactatatagtttaaattaagcatcttggaaacataaaataactctgtagacgatacttgactttcgaataagtttgcagacaaacgaagaaagaacagacctctcttaatttcagaagaaaactttttttcgtattcctgacgtctagagtttatatcaataagaaagttaagaattagtcggttaatgttgtatttcattacccaagtttgagatttcataatattatcaaaagacatgataatattaaagataaagcgctgactatgaacgaaatagctatatggttcgctcaagaatatagtcttgttaaacgtggaaacgataactgtatttttaatcacgtcagcggcatctaaattaaatataggtatatttattccacacactctacaatatgccacaccatcttcataataaataaattcgttagcaaaattattaattttagtgaaatagttagcgtcaactttcatagcttccttcaatctaatttgatgctcacacggtgcgaattccactctaacatcccttttccatgcctcaggttcatcgatctctataatatctagttttttgcgtttcacaaacacaggctcgtctctcgcgatgagatctgtatagtaactatgtaaatgataactagatagaaagatgtagctatatagatgacgatcctttaagagaggtatgatgactttaccccaatcagatagactgttgttatggtcttcggaaaaagaatttttataaatttttccagtattttccaaatatacgtacttaacatctaaaaaatccttaatgataataggaatggataatccgtctattttataaagaaatacatatcgcacattatacttttttttggaaatgggaataccgatgtgtctacataaatatgcaaagtctaaatattttttagagaatcttagttggtccaaattcttttccaagtacggtaatagatttttcatattgaacggtatcttcttaatctctggttctagttccgcattaaatgatgaaactaagtcactatttttataactaacgattacatcacctctaacatcatcatttaccagaatactgatcttcttttgtcgtaaatacatgtctaatgtgttaaaaaaaagatcatacaagttatacgtcatttcatctgtggtattcttgtcattgaaggataaactcgtactaatctcttctttaacagcctgttcaaatttatatcctatatacgaaaaaatagcaaccagtgtttgatcatccgcgtcaatattctgttctatcgtagtgtataacaatcgtatatcttcttctgtgatagtcgatacgttataaaggttgataacgaaaatatttttatttcgtgagataaagtcatcgtaggattttggacttatattcgcgtctagtagatatgcttttatttttggaatgatctcaattagaatagtctctttagagtccatttaaagttacaaacaactaggaaattggtttatgatgtataatttttttagtttttatagattctttattctatacttaaaaaatgaaaataaatacaaaggttcttgagggttgtgttaaattgaaagcgagaaataatcataaattatttcattatcgcgatatccgttaagtttgtatcgtaatggcgtggtcaattacaaataaagcggatactagtagcttcacaaagatggctgaaatcagagctcatctaaaaaatagcgctgaaaataaagataaaaacgaggatattttcccggaagatgtaataattccatctactaagcccaaaaccaaacgagccactactcctcgtaaaccagcggctactaaaagatcaaccaaaaaggaggaagtggaagaagaagtagttatagaggaatatcatcaaacaactgaaaaaaattctccatctcctggagtcagcgacattgtagaaagcgtggctgctgtagagctcgatgatagcgacggggatgatgaacctatggtacaagttgaagctggtaaagtaaatcatagtgctagaagcgatctttctgacctaaaggtggctaccgacaatatcgttaaagatcttaagaaaattattactagaatctctgcagtatcgacggttctagaggatgttcaagcagctggtatctctagacaatttacttctatgactaaagctattacaacactatctgatctagtcaccgagggaaaatctaaagttgttcgtaaaaaagttaaaacttgtaagaagtaaatgcgtgcacttttttataaagatggtaaactctttaccgataataattttttaaatcctgtatcagacgataatccagcgtatgaggttttgcaacatgttaaaattcctactcatttaacagatgtagtagtatatgaacaaacgtgggaggaggcgttaactagattaatttttgtgggaagtgattcaaaaggacgtagacaatacttttacggaaaaatgcatgtacagaatcgcaacgctaaaagagatcgtatttttgttagagtatataacgttatgaaacgaattaattgttttataaacaaaaatataaagaaatcgtccacagattccaattatcagttggcggtttttatgttaatggaaactatgttttttattagatttggtaaaatgaaatatcttaaggagaatgaaacagtagggttattaacactaaaaaataaacacatagaaataagtcccgatgaaatagttatcaagtttgtaggaaaggacaaagtttcacatgaatttgttgttcataagtctaatagactatataaaccgctattgaaactgacggatgattctagtcccgaagaatttctgttcaacaaactaagtgaacgaaaggtatacgaatgtatcaaacagtttggtattagaatcaaggatctccgaacgtatggagtcaattatacgtttttatataatttttggacaaatgtaaagtccatatctcctcttccgtcaccaaaaaagttaatagcgttaactatcaaacaaactgctgaagtggtaggtcatactccatcaatttcaaaaagagcttatatggcaacgactattttagaaatggtaaaggataaaaattttttagatgtagtatctaaaactacgttcgatgaattcctatctatagtcgtagatcacgttaaatcatctacggatggatgatatagatctttacacaaataattacaagaccgataaatggaaatggataagcgtatgaaatctctcgcaatgacagctttcttcggagagctaaacacattagatattatggcattgataatgtctatatttaaacgccatccaaacaataccattttttcagtggataaggatggtcagtttatgattgatttcgaatacgataattataaggcttctcaatatttggatctgaccctcactccgatatctggagatgaatgcaagactcacgcatcgagtatagccgaacaattggcgtgtgtggatattattaaagaggatattagcgaatatatcaaaactactccccgtcttaaacgatttataaaaaaataccgcaatagatcagatactcgtatcagtcgagatacagaaaagcttaaaatagctctagctaaaggcatagattacgaatatataaaagacgcttgttaataagtaaatgaaaaaaaactagtcgtttataataaaacacaatatggatgccaacatagtatcatcttctactattgcaacgtatatagacgctttagcgaagaatgcttcagaattagaacagaggtctaccgcatacgaaataaataatgaattggaactagtatttattaagccgccattaattactttgacaaatgtagtgaatatctctacgattcaggaatcgtttattcgatttaccgttactaataaggaaggtgttaaaattagaactaagattccattatctaaggtacatggtctagatgtaaaaaatgtacagttagtagatgctatagataacatagtttgggaaaagaaatcattagtgacggaaaatcgtcttcacaaagaatgcttgttgagactatcgacagaggaacgtcatatatttttggattacaagaaatatggatcctctatccgactagaattagtcaatcttattcaagcaaaaacaaaaaactttacgatagactttaagctaaaatattttctaggatccggtgcccagtctaaaagttctttattacacgctattaatcatccaaagtcaaggcctaatacatctctggaaatagaattcacacctagagacaatgaaaaagttccatatgatgaactaataaaggaattgacgactctatcacgtcatatatttatggcttctccagagaatgtaattctttctccgcctattaacgcgcctataaaaacctttatgttgcctaaacaagatatagtaggtttggatctggaaaatctatatgccgtaactaagactgacggaattcctataactatcagagttacatcaaaagggttgtattgttattttacacatcttggttatattattagatatcctgttaagagaataatagattccgaagtagtagtctttggtgaggcagttaaggataagaactggaccgtatatctcattaagctaatagagcctgtgaatgcaatcaatgatagactagaagaaagtaagtatgttgaatctaaactagtggatatttgtgatcggatagtattcaagtcaaagaaatacgaaggtccgtttactacaactagtgaagtcgtcgatatgttatctacatatttaccaaagcaaccagaaggtgttattctgttctattcaaagggacctaaatctaacattgattttaaaattaaaaaggaaaatactatagaccaaactgcaaatgtagtatttaggtacatgtccagtgaaccaattatctttggagaatcgtctatctttgtagagtataagaaatttagcaacgataaaggctttcctaaagaatatggttctggtaagattgtgttatataacggcgttaattatctaaataatatctattgtttggaatatattaatacacataatgaagtgggtattaagtccgtggttgtacctattaagtttatagcagaattcttagttaatggagaaatacttaaacctagaattgataaaaccatgaaatatattaactcagaagattattatggaaatcaacataatatcatagtcgaacatttaagagatcaaagcatcaaaataggagatatctttaacgaggataaactatcggatgtgggacatcaatacgccaataatgataaatttagattaaatccagaagttagttattttacgaataaacgaactagaggaccgttgggaattttatcaaactacgtcaagactcttcttatttctatgtattgttccaaaacatttttagacgattccaacaaacgaaaggtattggcgattgattttggaaacggtgcggacctggaaaaatacttttatggagagattgcgttattggtagcgacggatccggatgctgatgctatagctagaggaaatgaaagatacaacaaattaaactctggaattaaaaccaagtactacaaatttgactacattcaggaaactattcgatccgatacatttgtctctagtgtcagagaagtattctattttggaaagtttaatatcatcgactggcagtttgctatccattattcttttcatccgagacattatgctaccgtcatgaataacttatccgaactaactgcttctggaggcaaggtattaatcactaccatggacggagacaaattatcaaaattaacagataaaaagacttttataattcataagaatttacctagtagcgaaaactatatgtctgtagaaaaaatagctgatgatagaatagtggtatataatccatcaacaatgtctactccaatgactgaatacattatcaaaaagaacgatatagtcagagtgtttaacgaatacggatttgttcttgtagataacgttgatttcgctacaattatagaacgaagtaaaaagtttattaatggcgcatctacaatggaagatagaccgtctacaaaaaactttttcgaactaaatagaggagccattaaatgtgaaggtttagatgtcgaagacttacttagttactatgttgtttatgtcttttctaagcggtaaataataatatggtatgggttctgatatccccgttctaaatgcattaaataattccaatagagcgatttttgttcctataggaccttccaactgtggatactctgtattgttaatagatatattaatacttttgtcgggtaacagaggttctacgtcttctaaaaataaaagtttgataacatctggcctgttcataaataaaaacttggcgattctatatatactcttattatcaaatctagccattgtcttatagatgtgagctactgtaggtgtaccatttgattttctttctaatactatatatttctctcgaagaagttcttgcacatcatctgggaataaaatactactgttgagtaaatcagttattttttttatatcgatattgatggacatttttatagttaaggataataagtatcccaaagtcgataacgacgataacgaagtatttatacttttaggaaatcacaatgactttatcagatcaaaattaacaaaattaaaggagcatgtatttttttctgaatatattgtgactccagatacatatggatctttatgcgtcgaattaaatgggtctagttttcagcacggtggtagatatatagaggtggaggaatttatagatgctggaagacaagttagatggtgttctacatccaatcatatatctgaagatatgcacactgataaatttgtcatttatgatatttatacgtttgattcgttcaagaataaacgattggtatttgtacaggtgcctccatcattaggagatgatagctatttgactaatccgttattgtctccgtattatcgtaattcagtagccagacaaatggtcaatgatatgatttttaatcaagattcatttttaaaatatttattagaacatctgattagaagccactatagagtttctaaacatataacaatagttagatacaaggataccgaagaattaaatctaacgagaatatgttataatagagataagtttaaggcgtttgtattcgcttggtttaacggcgtttcggaaaatgaaaaggtactagatacgtataaaaaggtatctaatttgatataatgaattcagtgactgtatcacacgcgccatatactattacttatcacgatgattgggaaccagtaatgagtcaattggtagagttttataacgaagtagccagttggctgctacgagacgagacgtcgcctattcctgataagttctttatacagttgaaacaaccgcttagaaataaacgagtatgtgtgtgtggtatagatccgtatccgaaagatggaactggtgtaccgttcgaatcaccaaattttacaaaaaaatcaattaaggagatagcttcatctatatctagattaaccggagtaattgattataaaggttataaccttaatataatagacggggttataccctggaattattacttaagttgtaaattaggagaaacaaaaagtcacgcgatctactgggataagatttccaagttactgctgcagcatataactaaacacgttagtgttctttattgtttgggtaaaacagatttctcgaatatacgggcaaagttagaatccccggtaactaccatagtcggatatcatccagcggctagagaccgccaattcgagaaagatagatcatttgaaattatcaacgttttactggaattagacaacaaggcacctataaattgggctcaagggtttatttattaatgctttagtgaaattttaacttgtgttctaaatggatgcaactattagaggtaatgatgttatctttgttcttaagactataggtgtcccgtcagcgtgcagacaaaatgaagatccaagatttgtagaagcatttaaatgcgacgagttagaaagatatattgagaataatccagaatgtacactattcgaaagtcttagggatgaggaagcatactctatagtcagaattttcatggatgtagatttagacgcgtgtctagacgaaatagattatttaacggctattcaagattttattatcgaggtgtcaaactgtgtagctagattcgcgtttacagaatgcggtgccattcatgaaaatgtaataaaatccatgagatctaatttttcattgactaagtctacaaatagagataaaacaagttttcatattatctttttagacacgtataccactatggatacattgatagctatgaaacgaacactattagaattaagtagatcatctgaaaatccactaaccagatcgatagacactgccgtatataggagaaaaacaactcttcgggttgtaggtactaggaaaaatccaaattgcgacactattcatgtaatgcaaccaccgcatgataatatagaagattacctattcacttacgtggatatgaacaacaatagttattacttttctctacaacgacgattggaggatttagttcctgataagttatgggaaccagggtttatttcattcgaagacgctataaaaagagtttcaaaaatattcattaattctataataaactttaatgatctcgatgaaaataattttacaacggtaccactggtcatagattacgtaacaccttgtgcattatgtaaaaaacgatcgcataaacatccgcatcaactatcgttggaaaatggtgctattagaatttacaaaactggtaatccacatagttgtaaagttaaaattgttccgttggatggtaataaactgtttaatattgcacaaagaattttagacactaactctgttttattaaccgaacgaggagaccatatagtttggattaataattcatggaaatttaacagcgaagaacccttgataacaaaactaattctgtcaataagacatcaactacctaaggaatattcaagcgaattactctgtccgaggaaacgaaagactgtagaagctaacatacgagacatgttaatagattcagtggagaccgatacctatccggataaacttccgtttaaaaatggtgtattggacctggtagacggaatgttttactctggagatgatgctaaaaaatatacgtgtactgtatcaaccggatttaaatttgacgatacaaagttcgtcgaagacagtccagaaatggaagagttaatgaatatcattaacgatatccaaccattaacggatgaaaataagaaaaatagagagttgtacgaaaaaactttatctagttgtttatgcggtgctaccaaaggatgtttaacattcttttttggagaaactgcaactggaaagtcgacaaccaaacgtttgttaaagtctgctatcggtgacctgtttgttgagacgggtcaaacaattttaacagatgtattggataaaggacctaatccatttatcgctaacatgcatttgaaaagatctgtattctgtagcgaactacctgattttgcctgtagtggatcaaagaaaattagatctgacaatattaaaaagttgacagaaccttgtgtcattggaagaccgtgtttctccaataaaattaataatagaaaccatgcgacaatcattatcgatactaattacaaacctgtctttgataggatagataacgcattaatgagaagaattgccgtcgtgcgattcagaacacacttttctcaaccttctggtagagaggctgctgaaaataatgacgcgtacgataaagtcaaactattagacgaggggttagatggtaaaatacaaaataatagatatagattcgcatttctatacttgttggtgaaatggtacaaaaaatatcatgttcctattatgaaactatatcctacaccggaagagattccggactttgcattctatctcaaaataggtactctgttagtatctagctctgtaaagcatattccattaatgacggacctctccaaaaagggatatatattgtacgataatgtggttactcttccgttgactactttccaacagaaaatatccaagtattttaattctagactatttggacacgatatagagagcttcatcaatagacataagaaatttgccaatgttagtgatgaatatctgcaatatatattcatagaggatatttcatctccgtaaatatatgctcatatatttatagaagatatcacatatctaaatgaataccggaatcatagatttatttgataatcatgttgatagtataccaactatattacctcatcagttagctactctagattatctagttagaactatcatagatgagaacagaagcgtgttattgttccatattatgggatcaggtaaaacaataatcgctttgttgttcgccttggtagcttccagatttaaaaaggtttacattctagtgcctaatattaacattttgaaaatttttaattataatatgggtgtagctatgaacttgtttaatgacgaattcatagctgagaatatctttattcattccacaacaagtttttattctcttaattataacgataacgtcattaattataacggattatctcgctacaataactctatttttatcgttgatgaggcacataatatctttgggaataatactggagaacttatgaccgtgataaaaaataaaaacaagattccttttttactattgtctggatctcccattactaacacacctaatactctgggtcatattatagatttaatgtccgaagagacgatagattttggtgaaattattagtcgtggtaagaaagtaattcagacacttcttaacgaacgaggtgtgaatgtacttaaggatttgcttaaaggaagaatatcatattacgaaatgcctgataaagatctaccaacgataagatatcacggacgtaagtttctagatactagagtagtatattgtcacatgtctaaacttcaagagagagattatatgattactagacgacagctatgttatcatgaaatgtttgataaaaatatgtataacgtgtcaatggcagtattgggacaacttaatctgatgaataatttagatactttatttcaggaacaggataaggaattgtacccaaatctgaaaataaataatggcgtgttatacggagaagaattggtaacgttaaacattagttccaaatttaaatactttattaatcggatacagacactcaacggaaaacattttatatacttttctaattctacatatggcggattggtaattaaatatatcatgctcagtaatggatattctgaatataatggttctcagggaactaatccacatatgataaacggcaaaccaaaaacatttgctatcgttactagtaaaatgaaatcgtctttagaggatctattagatgtgtataattctcctgaaaacgatgatggcagtcaattgatgtttttgttttcgtcaaacattatgtccgaatcctatactctgaaagaggtaaggcatatttggtttatgactatcccagatactttttctcaatacaaccaaattcttggacgatctattagaaaattctcttacgccgatatttctgaaccagttaatgtatatcttttagccgccgtatattccgatttcaatgacgaagtgacgtcattaaacgattacacacaggatgaattaattaatgttttaccatttgacatcaaaaagctgttgtatctaaaatttaagactaaagaaacgaatagaatatactctattcttcaagagatgtctgaaacgtattctcttccaccacatccatcaattgtaaaagttttattgggagaattggtcagacaatttttttataataattctcgtattaagtataacgataccaagttacttaaaatggttacatcagttataaaaaataaagaagacgctaggaattacatagatgatattgtaaacggtcacttctttgtatcgaataaagtatttgataaatctcttttatacaaatacgaaaacgatattattacagtaccgtttagactttcctacgaaccatttgtttggggagttaactttcgtaaagaatataacgtggtatcttctccataaaactgatgagatatataaagaaataaatgtcgagctttgttaccaatggataccttccagttacattggagccacacgagctgacgttagacataaaaactaatattaggaatgccgtatataagacgtatctccatagagaaattagtggtaaaatggccaagaaaatagaaattcgtgaagacgtggaattacctctcggcgaaatagttaataattctgtagttataaacgttccgtgtgtaataacctacgcgtattatcacgttggggatatagtcagaggaacattaaacatcgaagatgaatcaaatgtaactattcaatgtggagatttaatctgtaaactaagtagagattcgggtactgtatcatttagcgattcaaagtactgcttttttcgaaatggtaatgcgtatgacaatggcagcgaagtcactgccgttctaatggaggctcaacaaggtatcgaatctagttttgtttttctcgcgaatatcgttgactcataaaaaagagaatagcggtaagtataaacacgaatactatggcaataattgcgaatgttttattcccttcgatatatttttgataatatgaaaaacatgtctctctcaaatcggacaaccatctcataaaatagttctcgcgcgctggagaggtagttgctgctcgtataatctccccagaataatatacttgcgtgtcgtcgttcaatttatacggatttctatagttctctgttatataatgcggttttccatcatgattagacgacgacaatagtgttctaaatttagatagttgatcagaatgaatgtttattggcgttggaaaaattatccatacagcgtctgcagagtggttgatagttgttcctagatatgtaaaataatccaacttactaggcagcaaattgtctagataaaatactgaatcaaacggtgcagacgtattggtggatctaatggaatccaattgattaactatcttttgaaaatatacatttttatgatccgatacttgtaagaatatagaaataatgataagtccatcatcgtgtttttttgcctcttcataagaactatattttttcttattccaatgaacaagattaatctctccagagtatttgtacacatctatcaagtgattggatccataatcgtcttcctttccccaatatatacgtagtgatgataacacatattcattggggagaaaccctccacttatatatcctcctttaaaattaatccttactagttttccagtgttctggatagtggttggtttcgactcattataatgtatgtctaacggcttcaatcgcgcgttagaaattgcttttttagtttctatattaataggagatagttgttgcggcatagtaaaaatgaaatgataactgtttaaaaatagctcttagtatgggaattacaatggatgaggaagtgatatttgaaactcctagagaattaatatctattaaacgaataaaagatattccaagatcaaaagacacgcatgtgtttgctgcgtgtataacaagtgacggatatccgttaataggagctagaagaacttcattcgcattccaagcgatattatctcaacaaaattcagattctatctttagagtatccactaaactattacggtttatgtactacaatgaactaagagaaatctttagacggttgagaaaaggttctatcaacgatatcgatcctcactttgaagagttaatattattgggtggtaaactagataaaaaggaatctattaaagattgtttaagaagagaattaaaagaggaaagtgatgaacgtataacagtaaaagaatttggaaatgtaattctaaaacttacaacacgggataaattatttaataaagtatatataagttattgcatggcgtgttttattaatcaatcgttggaggatttatcgcatactagtatttacaatgtagaaattagaaagattaaatcattaaatgattgtattaacgacgataaatacgaatatctgtcttatatttataatatgctagttaatagtaaatgaacttttacagatctagtataattagtcagattattaagtataatagacgactagctaagtctattatttgcgaggatgactctcaaattattacactcacggcattcgttaaccaatgcctatggtgtcataaacgagtatccgtgtccgctattttattaactactgataacaaaatattagtatgtaacagacgagatagttttctctattctgaaataattagaactagaaacatgtctagaaagaaacgattatttctgaattattccaattatttgtccaaacaggaaagaagtatactatcgtcatttttttctctagatccagctactactgataatgatagaatagatgctatttatccgggtggcatacccaaaaggggtgagaatgttccagagtgtttatccagggaaattaaagaagaagttaatatagacaattcttttgtattcatagacactcggttttttattcatggcatcatagaagataccattattaataaattttttgaggtaatcttctttgtcggaagaatatctttaacgagtgatcaaatcattgatacatttaaaagtaatcatgaaatcaaggatctaatatttttagatccgaattcaggtaatggactccaatacgaaattgcaaaatatgctctagatactgcaaaactcaaatgttatggccatagaggatgttattacgaatcattaaaaaaattaactgaggatgattgattagaaaatataaattaatttaccatcgtgtatttttataacgggattgtccggcatatcatgtagatagttaccgtctacatcgtatactcgaccatctacgcctttaaatcctctatttattgacattaatctattagaattggaataccaaatattagtaccctcaattagtttattggtaatattttttttagacgatagatcgatggctcttgaaaccaaggttttccaaccggactcattgtcgatcggtgagaagtctttttcattagcatgaatccattctaatgatgtatgtttaaacactctaaacaattggacaaattcttttgatttgctttgaatgatttcaaataggtcttcgtctacagtaggcataccattagataatctagccattataaagtgcacgtttacatatctacgttctggaggagtaagaacgtgactattgagacgaatggctcttcctactatctgacgaagagacgcctcgttccatgtcatatctaaaatgaagatatcattaattgagaaaaaactaataccctcgcctccactagaagagaatacgcatgttttaatgcattctccgttagtgtttgattcttggttaaactcagccaccgccttgattctagtatcttttgttctagatgagaactctatattagagataccaaagactttgaaatatagtaataagatttctattcctgactgattaacaaatggttcaaagactagacatttaccatgggatgctaatattcccaaacatacatctataaatttgacgcttttctcttttaattcagtaaatagagagatatcagccgcactagcatcccctttcaatagttctccctttttaaaggtatctaatgcggatttagaaaactctctatctcttaatgaatttttaaaatcattatatagtgttgctatctcttgcgcgtattcgcccggatcacgattttgtctttcaggaaagctatcgaacgtaaacgtagtagccatacgtctcagaattctaaatgatgatatacctgtttttatttcagcgagtttagccttttgataaatttcttcttgctttttcgacatattaacgtatcgcattaatactgttttcttagcgaatgatgcagacccttctacgtcatcaaaaatagaaaactcgttattaactatgtacgaacataggcctcctagtttggagactaattctttctcatcaactagacgtttattctcaaatagcgattggtgttgtaaggatcctggtcgtagtaagttaaccaacatggtgaattcttgcacactattaacgataggtgtagccgataaacaaatcatcttatggttttttaatgcgatggtcttagataaaaaattatatactgaacgagtaggacggatcttaccatcttctttgattaatgatttagaaatgaagttatgacattcatcaataatgacgcatattctactcttggaattaatagttttgatattagtaaaaaatttatttctaaaattttgatcatcgtaattaataaaaatacaatccttcgttatctctggagcgtatctgagtatagtgttcatccaaggatcttctatcaaagcctttttcaccaataagataatagcccaattcgtataaatatccttaagatgtttgagaatatatacagtagtcattgttttaccaacacccgtttcatggaacaataaaagagaatgcatactgtctaatcctaagaaaactcttgctacaaaatgttgataatccttgaggcgtactacgtctgttcccatcatttcaacaggcatattagtagttctgcgcaatgcataatcgatataggccgcgtgtgatttactcatttatgagtgataagtaataactatgttttaaaaatcacagcagtagtttaactagtcttctctgatgtttgttttcgatactttttgaatcagaagtcatactagaataaagcaacgagtgaacgtaatagagagcttcgtatactctattcgaaaactctaagaacttattaatgaattccgtatccactggattgtttaaaatactaaattgaacactgttcacatccttccaagaagaagacttagtgacggacttaacatgagacataaataaatccaaattttttttacaaacatcactagccaccataatggcgctatctttcaaccagctatcgcttacgcattttagcagtctaacatttttaaagagactacaatatattctcatagtatcgattacacctctaccgaataaagttggaagtttaataatacaatatttttcgtttacaaaatcaaataatggtcgaaacacgtcgaaggttaacatcttataatcgctaatgtatagattgttttcagtgagatgattattagatttaatagcatctcgttcacgtttgaacagtttattgtgtgcgctgaggtcggcaactacggcgtccgctttagtactcctcccataatactttacgctattaatctttaaaatttcatagactttatctagatcgctttctggtaacatgatatcatgtgtaaaaagttttaacatgtcggtcggcattctatttagatcattaactctagaaatctgaagaaagtaattagctccgtattccagactaggtaatgggcttttacctaaagacaagttaagttctggcaatgtttcataaaatggaagaaggacatgcgttccctcccggatattttttacaatttcatccatttacaactctatagtttgttttcattattattagttattatctcccataatcttggtaatacttaccccttgatcgtaagataccttatacaggtcattacatacaactaccaattgtttttgtacataatagattggatggttgacatccatggtggaataaactactcgaacagatagtttatctttccccctagatacattggccgtaatagttgtcggcctaaagaatatctttggtgtaaagttaaaagttagggttcttgttccattattgctttttgtcagtagttcattataaattctcgagatgggtccgttctctgaatatagaacatcatttccaaatctaacttctagtctagaaataatatcggtcttattcttaaaatctattcccttgatgaagggatcgttaatgaacaaatccttggcctttgattcggctgatctattatctccgttatagacgttacgttgactagtccaaagacttacaggaatagatgtatcgatgatgttgatactatgtgatatgtgagcaaagattgttctcttagtggcatcactatatgttccagtaatggcggaaaactttttagaaatgttatatataaaagaattttttcgtgttccaaacattagcagattagtatgaagataaacactcatattatcaggaacattatcaatttttacatacacatcagcatcttgaatagaaacgataccatcttctggaacctcaacaatctcggcagactccggataaccagtcggtgggccatcactaacaataactagatcatccaacaatctactcacatatgcatctatataatctttttcatcttgtgagtaccctggatacgaaataaatttattatccgtatttccataataaggtttagtataaacagagagcgatgttgccgcatgaacttcagttacagtcgccgttggttggtttatttgacctattactctcctaggtttctctataaacgatggtttaatttgtacattcttaaccatatatccaataaagctcaattcaggaacataaacaaattctttgttgaacgtttcaaagtcgaacgaagagtcacgaataacgatatcggatactggattgaaggttaccgttacggtaatttttgaatcggatagtttaagactgctgaatgtatcttccacatcaaacggagttttaatataaacgtatactgtagatggttctttaatagtgtcattaggagttaggccaatagaaatatcattaagttcactagaatatccagagtgtttcaaagcaattgtattattgatacaattattatataattcttcgccctcaatttcccaaataacaccgttacacgaagagatagatacgtgattaatacatttatatccaacatatggtacgtaaccgaatcttcccatacctttaacttctggaagttccaaactcagaaccaaatgattaagcgcagtaatatactgatccctaatttcgaagctagcgatagcctgattgtctggaccatcgtttgtcataactccggatagagaaatatattgcggcatatacaaagttggaatttgactatcgactgcgaagacattagaccgtttaatagagtcatccccaccgatcaaagaattaatgatagtattattcattttctatttaaaatggaaaaagcttacaataaactccgtagagaaatatctataatttgtgagttttccttaaagtaacagcttccgtaaacgccgtctttatctcttagtaggtttattgtatttatgaccttttccttatcttcatagaatactaaaggcaacaaagaaatttttggttcttctctaagagctacgtgagacttaaccatagaagccaacgaatccctacatattttagaacagaaatacccaacttcaccacccttgaatgtctcaatactaataggtctaaaaaccaaatcttgattacaaaaccaacacttatcaattacactatttgtcttaatagacacatctgccatagatttataatactttggtagtatacaagcgagtgcttcttctttagcgggcttaaagactgctttaggtgctgaaataaccacatctggaaggcttactcgcttagccatttaattacggaactatttttttatacttctaatgagcaagtagaaaacctctcatctacaaaaacatactcgtgtccataatcctctaccatagttacacgttttttagatctcatatgtgctaaaaagttttcccatactaattggttactattatttttcgtataatttttaacagtttgaggttttagatttttagttacagaagtgatatcgaatattttatccaaaaagaatgaataattaattgtcttagaaggagtgttttcttggcaaaagaataccaagtgcttaaatatttctactacttcattaatcttttctgtactcagattcagtttctcatcttttacttgattgattatttcaaagactaacttataatcctttttatttattctctcgttagccttaagaaaactagatacaaaatttgcatctacatcatccgtggatatttgatttttttccatgatatccaagagttccgagataatttctccagaacattgatgagacaataatctccgcaatacatttctcaaatgaataagtttattagacacatggaagtttgactttttttgtacctttgtacatttttgaaatacagactcgcaaaaaatacaatattcatatccttgttcagatactataccgttgtgtctacaaccgctacataatcgtagattcatgttaacactctacgtatctcgtcgtccaatattttatataaaaacattttatttctagacgttgccagaaaatcctgtaatatttttagttttttgggctgtgaataaagtatcgccctaatatggttaccgtcctccgccaatatagtagttaaattatccgcacatgcagaagaacaccgcttaggcggattcagtacaatgttatatttttcgtaccaactcatttaaatatcataatctaaaatagttctgtaatatgtctagcgctaatatattgatcataatcctgtgcataaattaagatacaacaatgtctcgaaatcatcgacatggcttcttccatagttagaagatcgtcgtcaaagttagcaacgtgattcatcaacatttgctgttttgaggcagcaaatactgaaccgtcgccattcaaccattcataaaaaccatcgtctgaatccattgataatttcttgtactggtttttgagagctcgcatcaatctagcatttctagctcccggattgaaaacagaaagaggatcgtacatccagggtccattttctgtaaatagaatcgtataatgtcccttcaagaagatatcagacgatccacaatcaaagaattggtctccgagtttgtaacaaactgcggactttaacctatacatgataccgtttagcatgatttctggtgatacgtcaatcggagtatcatctattagagatctaaagccggtgtaacattctccaccaaacatattcttattctgacgtcgttctacataaaacatcattgctccattaacgataacaggggaatgaacagcactacccatcacattagttcccaatggatcaatgtgtgtaactccagaacatcttccatatcctatgttaggaggagcgaacaccactcttccactattgccatcgaatgccatagaataaatatccttggaattgatagaaatcggactgtcggatgttgtgatcatcttcataggattaacaactatgtatggtgccgcctgaagtttcatatcgtaactgatgccgtttataggtctagccacagaaaccaacgtaggtctaaatccaactatagacaaaatagaagccaatatctgttcttcatctgtcataacttgagagcatccagtatgaataatcttcattagatggggatctaccgcatcatcatcgttacaataaaaaattcccattctaatgttcataattgcttttctaatcatggtatgcatgtttgctctctgaatctctgtggaaattagatctgatacacctgtaatcactatcggattatcctccgtaagacgattaaccaacaacatataattataagactttacttttctaaattcataaagttgctggattaggctataggtgtctccatgtacatacgcgttctcgagcgcaggaagtttaataccgaatagtgccatcagaataggatgaatatagtaattagtttctggttttctataaataaaagacaaatcttgtgaactagacatatcggtaaaatgcatggattggaatcgtgtagtcgacagaagaatatgatgattagatggagagtatattttatctaactctttgagttggtcaccgattctaggactagctcgagaatgaataagtactaaaggatgagtacatttcacagaaacactagcattgttcaatgtgctctttacatgggtaaggagttgaaatagctcgtttctatttgttctgacaatatttagtttattcataatgttaagcatatcctgaatagtaaagttagatgtgtcatacttgttagtagttagatatttagcaattgcattcccatcatttctcaatctcgtactccaatcatgcgtggatgctacttcgtcgatggaaaccatacaatcctttttgataggctgttgagattgattatttcctgcacgtttaggtttggtacgttgatttctagcccctgcggatataaagtcatcgtctacaattttggataatgaattgcatacactacaagacaaagatttatcagaagtgtgaatatgatcttcatctaccaaagaaagagtttgattagtataactagattttagtcctgcgttagatgttaaaaaaacatcgctattgaccacggcttccattatttatattcgtagtttttactcgaaagcgtgattttaatattcaatcttattacttttggaatcgttcaaaacctttgactaattgtagaatttgatctattgccctacgcgtatactcccttgcatcatatacgttcgtcaccagatcgtttgtttcggcctgaagttggtgcatatctctttcaacattcgacatgagatccttaagggccatatcgtctagattttgttgagatgctgctcctggatttggattttgttgtgctgttgtacatactgtaccaccagtaggtgtaggagtacatacagtggccacaataggaggttgaggaggtgtaaccgttggagtagtacaagaaatacttccatccgattgttgtgtacatgtagttgttggtaacgtctgagaaggttgggtagatggcggcgtcgtcgtcttttgatctttattaaatttagagataatatcctgaacagcattgctcggcgtcaacgctggaaggagtgaactcgccggcgcatcagtatctgcagacagccaatcaaaaagattagacatatcagatgatgtattagtttgttgtcgtggttttggtgtaggagccggtgtagctgttggaaccggctgtggagttatatgaatagttggttgtagcggttggataggctgtctgctggcggccatcatattatctctagctagttgttctcgcaactgtctttgataatacgactcttgagactttagtcctatttcaatcgcttcatcctttttcgtatccggatccttttcttcagaataatagattgacgactttggtgtagaggattctgccagcccctgtgagaacttgttaaagaagtccatttaaggctttaaaattgaattgcgattataagattaaatggcagacacagacgatattatcgactatgaatccgatgatctcaccgaatacgaggatgatgaagaagaggaagaagatggagagtcactagaaactagtgatatagatcccaaatcttcttataagattgtagaatcagcatccactcatatagaagatgcgcattccaatcttaaacatatagggaatcatatatctgctcttaaacgacgctatactagacgtataagtctatttgaaatagcgggtataatagcagaaagctataacttgcttcaacgaggaagattacctctagtttcagaattttctgacgaaacgatgaagcaaaatatgctacatgtaattatacaagagatagaggagggttcttgtcctatagtcatcgaaaagaacggagaattgttgtcggtaaacgattttgacaaagatggtctaaaattccatctagactatattatcaaaatttggaaacttcaaaaacgatattagaatttatacgaatatcgttctctaaatgtcacaatcaagtctcgcatgttcagcaatttattgtcgtactttatatcgtgttcattaacgatatcttgcaaaatagtaatgattctatcttccttcgatagatattcttcagagattattgtcttatattctttcttgttatcagatatgaatttgataagactttgaacattattgatacccgtctgtttaattttttctacagatattttagttttggcagattctatcgtatctgtcaatagacatccaacatcgacattcgacgtcaattgtctataaatcaacgtataaattttagaaataacattagcgaattgttgtgcattgatgtcgttattctgaaacagtatgattttaggtagcattttcttaacaaagagaacgtatttattgttactcagttgaacagatgatatatccagattactaacgcatctgattccatataccaaactttcagaagaaatggtgtacaattgtttgtattcattcaatgtctctttttcagaaattagtttagagtcgaatactgcaataattttcaagagatagttttcatcagataagattttatttagtgtagatatgataaaactattgttttgttggagaacttgatacgccgcgttctctgtagtcgacgctctcaaatgggaaacaatctccattatttttttggaatcggatacaatatcttcggtatcttgacgcaatctagtatacatagagttaagagaaattagagtttgtacattaagcaacatgtctctaaatgtggctgcaaacttttccttttccacatcatctagtttattatataccgatttcacaacggcaccagatttaaggaaccagaatgaaaaactctgataactacaatatttcatcatagttacgattttatcatcttctatagttggtgtaatagcgcatacctttttctccaagactggaaccaacgtcataaaaatgtttaaatcaaaatccatatcaacatctgatgcgctaagaccagtctcgcgttcaagattatctttactaatggtgacgaactcatcgtatagaactctaagtttgtccattatttatttacagatttagttgtttaatttatttgtgctcttccagagttgggatagtatttttctaacgtcggtattatattattaggatctacgttcatatgtatcataatattaatcatccacgttttgataaatctatctttagcttctgaaataacgtatttaaacaaaggagaaaaatatttagctacggcatcagacgcaataacattttttgtaaatgtaacgtatttagacgacagatcttcgttaaaaagttttccatctatgtagaatccatcggttgttaacaccattcccgcgtcagattgaataggagtttgaatagtttgttttggaaatagatccttcaataacttatagttgggtgggaaaaaatcgattttatcactagactctttcttttttactatcattacctcatgaactatttcttgaatgagtatatgtattttctttcctatatcggacgcgttcattggaaaatataccatgtcgttaactataagaatatttttatcctcgtttacaaactgaataatatcagatgtagttcgtaaacgaactatatcatcaccagcacaacatctaactatatgatatccactagtttcctttagtcgtttattatcttgttccatattagcagtcattccatcatttaagaaggcgtcaaagataatagggagaaatgacattttggattctgttacaactttaccaaaattaaggatatacggacttactatctttttctcaacgtcgatttgatgaacacacgatgaaaatgtacttcgatgagattgatcatgtagaaaacaacaagggatacaatatttccacatatcatgaaatatattaagaaatcccaccttattatatttccccaaaggatccatgcatgtaaacattatgccgttatcattaataaagacttctttctcatcggatctgtaaaagttgttactgatttttttcattccaggatctagataattaataatgatgggttttctattcttattctttgtattttggcatatcctagaccagtaaacagtttccactttggtaaaatcagcagacttttgaacgctattaaacatggcattaatggcaataactaaaaatgtaaaatatttttctatgttaggaatatggtttttcactttaatagatatatggtttttggccaaaatgatagatatttttttatccgaggatagtaaaatattattagtcgccgtctctataaaaatgaagctagtctcgatatccaattttattctagaattgataggagtcgccaaatgtaccttatacgttatatctcccttgatgcgttccatttgtgtatctatatcggacacaagatctgtaaatagttttacgttattaatcatcacggtatcgccgtcgctagataacgctaatgtaccatccaagtcccaaatggagagatttaactgttcatcgtttagaataaaatgattaccggtcatattaataaagtgttcatcgtatctagataacaacgacttataattaatgtccaagtcttgaactcgctgaatgatcttttttaacccagttagttttagattggtacgaaatatattgttaaactttgattctacagtaatgtccaaatctagttgtggaaatacttccatcaacattgtttcaaacttgataatattattatctacatcttcatacgatccaaattccggaatagatgtatcgcacgctctggccacccagataaccaaaaagtcacacgctccaggatatacattgtataaaaagctatcgttttttagtagtgtttttttctgagtatatacgaagggattaaaaatagtattatcaacgtaactatattccaaattattcttatgagaatagataataatatcgtccttaatatctaacaaatttcctaaatatccctttaattgagtcattcgaagcgtcaatagaatatgtctcttaactatttccggctgttgtatatttaaatgacttcgtaaaaaataatatatgggcgacttctcatctatgtaatcatatggagtgagatatagggctcgttctacctcctgccccttacccacctgtaataccaattgcggacttactatatatcgcatatttatatcgtggggtaaagtgaaaatctactaccgatgatgtaagtcttacaatgttcgaaccagtaccagatcttaatttggaggcctccgtagaactaggggaggtaaatatagatcaaacaacacctatgataaaggaaaatagcggttttatatcccgtagtagacgtctattcgcccatagatctaaggatgatgagagaaaactagcactacgattctttttacaaagactttattttttagatcatagagagattcattatttgttcagatgcgttgacgctgtaaaagacgtcactattaccaaaaaaaataacattatcgtggcgccttatatagcacttttaactatcgcatcaaaaggatgcaaacttacagaaacaatgattgaagcattctttccagaactatataatgaacatagtaagaaatttaaattcaactctcaagtatccatcatccaagaaaaactcggataccagtttggaaactatcacgtttatgattttgaaccgtattactctacagtagctctggctattcgagatgaacattcatctggcatttttaatatccgtcaagagagttatctggtaagttcattatctgaaataacatatagattttatctaattaatctaaaatctgatcttgttcaatggagtgctagtacgggcgctgtaattaatcaaatggtaaatactgtattgattacagtgtatgaaaagttacaactggtcatagaaaatgattcacaatttacatgttcattggctgtggaatcaaaacttccaataaaattacttaaagatagaaatgaattatttacaaaattcatcaacgagttaaaaaagaccagttcattcaagataagcaaacgcgataaggatacgctactaaaatattttacttaggactggagttagaatttatagacgactcatttcgtttatcattattagtattcttcttgttatcttgttcagaaatatacagcaatgctatgcctaatactaaatacattatcatgcttgcaatggctctaacaacgacgaaccaaaatgaatttggtcgtagcttttgttcacaaaaatacataaagaaatgtctacataaatctatggcgccattggctacttgaaatagcgccagtcctcctacagattttaatatagctgtataacatgacatttattcatcatcaaaagagacagagtcaccatctgtcatatttagattttttttcatgtgttcaaagtatcctctactcatttcattataatagtttatcatacttagaattttaggacggatcaatgagtaagacttgactagatcgtcagtagtaatttgtgcatcgtctattctgcatccgcttcgtcgaataatgtatagcatcgctttgagattctccatagctatcaagtctttatacaatgacatggaaatatctgtgaatactttatacttctccaacatcgatgccttaacatcatcgcctactttagcattgaaaatacgttctattgtgtagatggatgtagcaagatttttaaacaacaatgccattttacacgatgattgcctcaagtctccaatcgtttgtttagaacgattagctacagagtccaatgcttggctgactagcatattattatctttagaaattgtattcttcaatgaggcgtttatcatatctgtgatttcgttagtcatattacagtctgactgggttgtaatgttatccaacatatcacctatggatacggtacacgtaccagcatttgtaataatcctatctaagatgttgtatggcattgcgcagaaaatatcttctcctgtaatatttccactctcgataaatctactcagattattcttaaatgccttattctctggagaaaagatatcagtgtccatcatttcattaatagtatacgcagaaaagataccacgagtatcaattctatccaagatacttatcggttccgagtcacagataatggtttcctctccttcgggagatcctgcatagaaatatctaggacaatagtttctatactgtctgtaactctgataatctctaaagtcactaactgataccatgaaattgagaagatcaaacgctgaagtaattaatttttctgcctcgtttttactacaactagttttcatcaatgtagtgacgatgtattgtttagttactcttggtctaatactgatgatagagatattattacttcccataatggatcttctagtagtcaccttaaagcccattgatgcaaatagcagatagataaagtcttggtatgactcctttctaatatagtacggactacctttgtcacccaactttatacccacataagccataacaacctctttaatagccgtttcatgaggtttatcagccatgagcctgagtagttggaagaatctcatgaatcctgtctcagaaagtcctatatgcatgatagatttatctttcctgggaaactctcgtatagtcatagatgaaatactcttcaaagtttctgaaataagattagtaacagtcttacctccgactactctaggtaacaaacaaactctaataggtgttttctctgcggagataatatcagaaaggatagagcaataagtagtattattgtgattataaagaccgaatacataacaggtagaatttataaacatcatgtcctgaaggtttttagacttgtattcctcgtaatccataccgtcccaaaacatggatttggtaactttgatagccgtagatctttgttccttcgccaacaggttaaagaaattaataaagaatttgtggtttctacctatgtctacaaattgcacgtttggaagcgccacggttacattcactgcagcattttgaggatcgcgagtatgaagtacgatgttattgtttactggtatatctggaaagaattctaccagtctaggaataagagattgatatcgcatagaaatacaaaagttcataatctcatcatctaagagcattttgttaccattgtaataaatatccactctgtcatatgtataaatgaagtactgttcaaacatgatgagatgtttatatgttggcatagtagtgagatctacgtttggtaatggcaatgtattaagattaactccataatgtctagcagcatctgcgatgttataagcgttgtcaaagcggggtcgatcttgtgctgttatatattgtctaacacctataagattatcaaaatcttgtctgcttaatacaccgttaacaatttttgccttgaattcttttattggtgcattaataacatccttatagaggatgttaaacaaataagtgttatcaaagttaagatctggatatttcttttctgctagaacatccattgagtcggagccatctggtttaatataaccaccgataaatctagctctgtattctgtatccgtcaatctaatattaagaaggtgttgagtgaaaggtggaagatcgtaaaagctgtgagtattaatgataggattagtttccgaactaatgttaattggggtattaataatatctatatttccagcgttaagtgtaacattaaacagttttaattcacgtgacgtggtatcaattaaataattaatgcccaatttggatatagcagcctgaagctcatcttgtttagttacggatcctaatgagttattaagcaatatatcgaacggatgaacgaaggttgttttaagttggtcacatactttgtaatctagacatagatgcggaagaacggtagaaactatacgaaataaatattcagagtcctctaattgatcaagagtaactattgacttaataggcatcatttatttagtattaaatgacgaccgtaccagtgacggatatacaaaacgatttaattacagagttttcagaagataattatccatctaacaaaaattatgaaataactcttcgtcaaatgtctattctaactcacgttaacaacgtggtagatagagaacataatgccgccgtagtgtcatctccagaggaaatatcctcacaacttaatgaagatctatttccagatgatgattctccggccactattatcgaacgagtacaacctcatactactattattgacgatactccacctcctacgtttcgtagagagttattgatatcggaacaacgtcaacaacgagaaaaaagatttaatattacagtatcgaaaaatgctgaagcaataatggaatctagatctatgatatcttctatgccaacacaaacaccatccttgggagtagtttatgataaagataaaagaattcagatgttggaggatgaagtggttaatcttagaaatcaacgatctaatacaaaatcatctgataatttagataattttaccagaatactatttggtaagactccgtataaatcaacagaagttaataagcgtatagccatcgttaattatgcaaatttgaacgggtctcccttatcagtcgaggacttggatgtttgttcagaggatgaaatagatagaatctataaaacgattaaacaatatcacgaaagtagaaaacgaaaaattatcgtcactaacgtgattattattgtcataaatattatcgagcaagcattgctaaaactcggatttgaagaaatcaaaggactgagtaccgatatcacttcagaaattatcgatgtggagatcggagatgactgcgatgctgtagcatcaaaactaggaatcggtaacagtccggttcttaatattgtattgtttatactcaagatattcgttaaacgaattaaaattatttaatttaatacattcccatatccagacaacaatcgtctggattaatctgttcctgtcgtctcataccggacgacatattaatctttttattagtaggcatctttttagatggtttctttttcccagcattaactgagtcgatacctagaagatcgtgattgatctctccgaccattccacgaacttctaattggccgtctctgacggtaccataaactattttaccagcattagtaacagcttggacaatctgaccatccatcgcattgtacgatgtagtagtaactgttgttctacgtctaggagcaccagaagtatttttggagcccttggatgttgatgtagaagaagacgaggattttgattttggtttacatgtaatacattttgtatcacatgcgccggcagtcacatctgtttgagaattaagattattgttgcctcctttgacggctgcatctccaccgatttgcgctagtagatttttaagctgtggtgtaatcttattaactgtttcgatataatcatcgtaactgcttctaacggctaaattttttttatccgccatttagaagctaaaaatatttttatttatgcagaagatttaactagattatacaatgaactaatatgatccttttccagattatttacaaacttggtattttttggttctggaggaggcgaatttaaattcggacttggatttggattttgtgggttcttgatcttattatacagcgcatataggatggcgacggtaactgctacgcaaataccgatcaacaaaagaataccaatcatttattgacaataacttcactattgatcaagtatgcaatatatcatcttttcactaaataagtagtaataatgattcaacaatgtcgagatatatggacgataataatttagttcatggaaatatcgctatgattggtatgaatgactccgctaactctgtggggcgcgcagtgctttccccacatagaataaattagcattccgactgtgataataataccaagtataaacgccataatactcaatactttccatgtacgagtgggactggtagacttactaaagtcaataaaggcgaagatacacgaaagaatcaaaagaatgattccagcgattagcacgccggaaaaataatttccaatcataagcatcatatccatttaactaataaaaattttaaatcgccgaatgaacaaagtggaatataaaccatataaaaacaatagtttgtactgcaaaaataatatctatttttgttttcgaagatatggtaaaattaaatagtagtacacagcatgttataactaacagcagcaacggctcgtaattacttatcatttactagacgaaaaggtggtgggatattttcttgctcaaataatacgaatatatcacccatccattttatgcgatgtttatatactctaatctttaatagatctatagacgacgggtttaccaacaatatagattttatcgattcatctaatttaaacccttccttaaacgtgaatgatctattatctggcataacgatgactctacccgatgaatcggacaatgtactgggccatgtagaataaattatcaacgaattatcgtctacgaacatttatatcatttgttttaattttagtacgcgaataaatagatataaaatagaaaataacagatattacaaccaatgttatggccgcgcccggccggccgcggccgctttttttctagacactaaataaatagtaagattaaattaattataaaattatgtatataatattaattataaaattatgtatatgatttactaactttagttagataaattaataatacataaattttagtatattaatattataaattaataatacataaattttagtatattaatattatattttaaatatttatttagtgtctagaaaaaaaggcctagcaggcc

SEQ ID NO: 14 - DNA, 62068 bp, Artificial Sequence
  sMVA fragment 3
ggcctagcaggcctttttttctagacactaaataaatagtaagattaaattaattataaaattatgtatataatattaattataaaattatgtatatgatttactaactttagttagataaattaataatacataaattttagtatattaatattataaattaataatacataaattttagtatattaatattatattttaaatatttatttagtgtctagaaaaaaaggccggccgggtattaataatatctatatttccagcgttaagtgtaacattaaacagttttaattcacgtgacgtggtatcaattaaataattaatgcccaatttggatatagcagcctgaagctcatcttgtttagttacggatcctaatgagttattaagcaatatatcgaacggatgaacgaaggttgttttaagttggtcacatactttgtaatctagacatagatgcggaagaacggtagaaactatacgaaataaatattcagagtcctctaattgatcaagagtaactattgacttaataggcatcatttatttagtattaaatgacgaccgtaccagtgacggatatacaaaacgatttaattacagagttttcagaagataattatccatctaacaaaaattatgaaataactcttcgtcaaatgtctattctaactcacgttaacaacgtggtagatagagaacataatgccgccgtagtgtcatctccagaggaaatatcctcacaacttaatgaagatctatttccagatgatgattctccggccactattatcgaacgagtacaacctcatactactattattgacgatactccacctcctacgtttcgtagagagttattgatatcggaacaacgtcaacaacgagaaaaaagatttaatattacagtatcgaaaaatgctgaagcaataatggaatctagatctatgatatcttctatgccaacacaaacaccatccttgggagtagtttatgataaagataaaagaattcagatgttggaggatgaagtggttaatcttagaaatcaacgatctaatacaaaatcatctgataatttagataattttaccagaatactatttggtaagactccgtataaatcaacagaagttaataagcgtatagccatcgttaattatgcaaatttgaacgggtctcccttatcagtcgaggacttggatgtttgttcagaggatgaaatagatagaatctataaaacgattaaacaatatcacgaaagtagaaaacgaaaaattatcgtcactaacgtgattattattgtcataaatattatcgagcaagcattgctaaaactcggatttgaagaaatcaaaggactgagtaccgatatcacttcagaaattatcgatgtggagatcggagatgactgcgatgctgtagcatcaaaactaggaatcggtaacagtccggttcttaatattgtattgtttatactcaagatattcgttaaacgaattaaaattatttaatttaatacattcccatatccagacaacaatcgtctggattaatctgttcctgtcgtctcataccggacgacatattaatctttttattagtaggcatctttttagatggtttctttttcccagcattaactgagtcgatacctagaagatcgtgattgatctctccgaccattccacgaacttctaattggccgtctctgacggtaccataaactattttaccagcattagtaacagcttggacaatctgaccatccatcgcattgtacgatgtagtagtaactgttgttctacgtctaggagcaccagaagtatttttggagcccttggatgttgatgtagaagaagacgaggattttgattttggtttacatgtaatacattttgtatcacatgcgccggcagtcacatctgtttgagaattaagattattgttgcctcctttgacggctgcatctccaccgatttgcgctagtagatttttaagctgtggtgtaatcttattaactgtttcgatataatcatcgtaactgcttctaacggctaaattttttttatccgccatttagaagctaaaaatatttttatttatgcagaagatttaactagattatacaatgaactaatatgatccttttccagattatttacaaacttggtattttttggttctggaggaggcgaatttaaattcggacttggatttggattttgtgggttcttgatcttattatacagcgcatataggatggcgacggtaactgctacgcaaataccgatcaacaaaagaataccaatcatttattgacaataacttcactattgatcaagtatgcaatatatcatcttttcactaaataagtagtaataatgattcaacaatgtcgagatatatggacgataataatttagttcatggaaatatcgctatgattggtatgaatgactccgctaactctgtggggcgcgcagtgctttccccacatagaataaattagcattccgactgtgataataataccaagtataaacgccataatactcaatactttccatgtacgagtgggactggtagacttactaaagtcaataaaggcgaagatacacgaaagaatcaaaagaatgattccagcgattagcacgccggaaaaataatttccaatcataagcatcatatccatttaactaataaaaattttaaatcgccgaatgaacaaagtggaatataaaccatataaaaacaatagtttgtactgcaaaaataatatctatttttgttttcgaagatatggtaaaattaaatagtagtacacagcatgttataactaacagcagcaacggctcgtaattacttatcatttactagacgaaaaggtggtgggatattttcttgctcaaataatacgaatatatcacccatccattttatgcgatgtttatatactctaatctttaatagatctatagacgacgggtttaccaacaatatagattttatcgattcatctaatttaaacccttccttaaacgtgaatgatctattatctggcataacgatgactctacccgatgaatcggacaatgtactgggccatgtagaataaattatcaacgaattatcgtctacgaacatttatatcatttgttttaattttagtacgcgaataaatagatataaaatagaaaataacagatattacaaccaatgttatggccgcgcccaaccaggtaggcagttttattttatcttttactacaggttctcctggatgtacgtcaccaacggcggacgtagttctagtacaattagacgtaagttccgcttgggaattttttaacgctaaagagttaacgttaatcgtgcacccaacgtatttacatctagttctttgaacatcttgattataatataaccattttctatctctagattcgtcggtgcactcatgtaaccaacataccctaggtcctaaatatttatctccggaattagattttggataattcgcgcaccaacaatttctatttcctttatgatcgttacaaaagacgtataatgccgtatccccaaaagtaaaataatcaggacgaataattctaataaactcagaacaatatctcgcatccatatgtttggagcaaatatcggaataagtagacatagccggtttccgttttgcacgtaaccattctaaacaattggggtttccaggatcgtttctacaaaatccagtcatgaaatcatcacaatgttctgtcttgtaattattattaaatatttttggacagtgtttggtatttgtcttagaacaacattttgccacgctatcactatcgcccaggagataatccttttttataaaatgacatcgttgcccggatgctatataatcagtagcgtgttttaaatccttaatatattcaggagttacctcgttctgataatagattaatgatccaggacgaaatttgaaagaactacatggttctccatgaattaatacatattgtttagcaaattcaggaactataaaactactacaatgatctatcgacataccatctatcaaacaaaacttgggtttaatttctcccggagatgtttcataatagtacgtataactttcttctgcaaacttaacagctctattatattcaggataattaaaacctaattccatatatttgtctcgtatatctgctattcctggtgctattttgattctattaagagtaacggctgcccccatttttaataatcgtcagtatttaaactgttaaatgttggtatatcaacatttaccttatttcccgcagtataaggtttgttgcaggtatactgttcaggaatggttacatttatactttttctatagtcctgtctttcgatgttcatcacatatgcaaagaacagaataaacaaaataatgtaagaaataatattaaatatctgtgaattcgtaaatacattgattgccataataattacagcagctacaatacatacaatagacattcccacagtgttgccattacctccacgatacatttgagttactaagcaataggtaataactaagctagtaagaggcaatagaaaagatgagataaatatcatcaatatagagattagaggagggctatatagagccaagacgaacaaaatcaaaccgagtaacgttctaacatcattatttttgaagattcccaaataatcattcattcctccataatcgttttgcatcatacctccatctttaggcataaacgattgctgctgttcctctgtaaataaatctttatcaagcactccagcacccgcagagaagtcgtcaagcatattgtaatatcttaaataactcatttatatattaaaaaatgtcactattaaagatggagtataatctttatgccgaactaaaaaaaatgacttgtggtcaacccctaagtctttttaacgaagacggggatttcgtagaagttgaaccgggatcatcctttaagtttctgatacctaagggattttacgcctctccttccgtaaagacgagtctagtatttgaaacattaacaacgaccgataataaaattactagtatcaatccaacaaatgcgccaaagttatatcctcttcaacgcaaagtcgtatctgaagtagtttctaatatgaggaaaatgatcgaatcaaaacgtcctctatacatcactcttcacttggcgtgtggatttggtaagactattaccacgtgttatcttatggctacacacggtagaaaaaccgtcatttgcgtacccaataaaatgttaatacatcaatggaagacacaggtagaggcagtcggattggaacataagatatccatagatggagtaagtagtctattaaaggaactaaagactcaaagtccggatgtattaatagtagtcagtagacatctgacaaacgatgccttttgtaaatatatcaataagcattatgatttgttcatcttggatgaatcacatacgtataatctgatgaacaatacagcagttacaagatttttagcgtattatcctccgatgatgtgttattttttaactgctacacctagaccatctaacagaatttattgtaacagtattattaatattgccaagttatccgatctaaaaaaaactatctatgcagtagatagtttttttgagccatattccacagataatattagacatatgataaaacgattagatggaccatctaataaatatcatatatataccgagaagttattatctgtagacgagcctagaaatcaacttattcttaataccctggtagaagaattcaagtcaggaactattaatcgcattttagttattactaaactacgtgaacatatggtattcttctacaaacgattattagattttttcggatcagaggttgtatttataggagacgcccaaaatagacgtactccagatatggtcaaatcaatcaaggaactaaatagatttatattcgtatccaccttattttattccggtactggtttagatattcctagtttggattctttgttcatttgctcggcagtaatcaacaatatgcaaatagagcaattactagggagggtatgtcgagaaacagaactattagataggacggtatatgtatttcctagcacatccatcaaagaaataaagtacatgataggaaatttcgttcaacgaattattagtctgtctgtagataaactaggatttaaacaaaaaagttatcggaaacatcaagaatccgatcccacttctgtatgtacaacatcctccagagaagaacgtgtattaaatagaatatttaactcgcaaaatcgttaagaagtttaagcgacgatccgcatgctgcgcaggccagtgtattacccctcatagtattaatataatccaatgatacttttgtgatgtcggaaatcttaaccaatttagactgacaggcagaacacgtcatgcaatcatcatcgtcatcgataactgtagtcttgggcttctttttgcggctcttcattccggaacgcacattggtgctatccatttaggtagtaaaaaataagtcagaatatgccctatagcacgatcgtgcaaaacctggtatatcgtctctatctttatcacaatatagtgtatcgacatctttattattattgacctcgtttatcttggaacatggaatgggaacatttttgttatcaacggccacctttgccttaattccagatgttgtaaaattataactaaacagtctatcatcgacacaaatgaaattcttgtttagacgtttgtagtttacgtatgcggctcgttcgcgtctcattttttcagatattgcaggtactataatattaaaaataagaatgaaataacataggattaaaaataaagttatcatgacttctagcgctgatttaactaacttaaaagaattacttagtctgtacaaaagtttgaaattttcagattctgcggctatagaaaagtataattctttggtagaatggggaacatctacttactggaaaataggcgtgcaaaaggtagctaatgtcgagacgtcaatatctgattattatgatgaggtaaaaaataaaccgtttaatattgatccgggctattacattttcttaccggtatattttgggagcgtctttatttattcgaagggtaaaaatatggtagaacttggatctggaaactcttttcaaataccagatgatatgcgaagtgcgtgtaacaaagtattagacagcgataacggaatagactttctgagatttgttttgttaaacaatagatggataatggaagatgctatatcaaaatatcagtctccagttaatatatttaaactagctagtgagtacggattaaacatacccaaatatttagaaattgaaatagaggaagacacattatttgacgacgagttatactctattatagaacgctctttcgatgataaatttccaaaaatatccatatcgtatattaagttgggagaacttaggcggcaagttgtagactttttcaaattctcattcatgtatattgagtccatcaaggtagatcgtataggagataatatttttattcctagcgttataacaaaatcaggaaaaaagatattagtaaaagatgtagaccatttaatacgatccaaggttagagaacatacatttgtaaaagtaaaaaagaaaaacacattttccattttatacgactatgatggaaacggaacagaaactagaggagaagtaataaaacgaattatagacactataggacgagactattatgttaacggaaagtatttctctaaggttggtagtgcaggcttaaagcaattgactaataaattagatattaatgagtgcgcaactgtcgatgagttagttgatgagattaataaatccggaactgtaaaacgaaaaataaaaaaccaatcagcatttgatttaagcagagaatgtttgggatatccagaagcggattttataacgttagttaataacatgcggttcaaaatagaaaattgtaaggttgtaaatttcaatattgaaaatactaattgtttaaataacccgagtattgagactatatatggaaactttaaccagttcgtctcaatctttaatatcgtcaccgatgtcaaaaaaagattattcgagtgaaataatatgcgcctttgatataggtgcaaaaaatcctgccagaactgttttagaagtcaaggataactccgttagggtattggatatatcaaaattagactggagttctgattgggaaaggcacatagctaaagatttgtcacaatatgaatacactacagttcttctagaacgtcagcctagaaggtcgccgtacgtcaaatttatctattttattaaaggctttttatatcatacatcggctgccaaagttatttgcgtctcgcctgtcatgtctggtaattcatatagagatcgaaaaaagagatcggtcgaagcatttcttgattggatggacacattcggattgcgagactccgttccggatagacgcaaattagacgatgtagcggatagtttcaatttggctatgagatacgtattagataaatggaatactaattatacaccttataataggtgtaaatctagaaattacataaaaaaaatgtaataacgttagtaacgccattatggataatctatttacctttctacatgaaatagaagatagatatgccagaactatttttaactttcatctaataagttgcgatgaaataggagatatatatggtcttatgaaagaacgcatttcctcagaggatatgtttgataatatagtgtataataaagatatacatcatgccattaagaaactagtgtattgcgacatccaacttactaaacacattattaatcagaatacgtatccggtatttaacgattcttcacaagtgaaatgttgtcattatttcgatataaactcagataatagcaatattagctctcgtacagtagagatatttgagagggaaaagtcatctcttgtatcatatattaaaactaccaataagaagagaaaggtcaattatggggaaataaagaaaactgtacatggaggcactaatgcaaattacttttccggtaaaaagtctgatgagtatctgagcactacagtcaggtccaacattaatcaaccttggatcaaaaccatttctaagagaatgagagtagatatcattaatcactctatagtaacgcgtggaaaaagctctatattacaaactatagaaattatttttactaatagaacatgtgtgaaaatattcaaggattctactatgcacattattctatccaaggacaaggatgaaaaggggtgtatacacatgattgacaaattattctatgtctattataatttatttctgttgttcgaggatatcatccaaaacgagtactttaaagaagtagctaatgttgtaaaccacgtactcacggctacggcattagatgagaaattattcctaattaagaaaatggctgaacacgatgtttatggagttagcaatttcaaaatagggatgtttaacctgacatttattaagtcgttggatcataccgttttcccctctctgttagatgaggatagcaaaataaagttttttaaggggaaaaagctcaatattgtagcattacgatctctggaggattgtataaattacgtgactaaatccgagaatatgatagaaatgatgaaggaaagatcgactattttaaatagcatagatatagaaacggaatcggtagatcgtctaaaagaattgcttctaaaatgaaaaaaaaacactaattcagaaatggatcaacgactcggatataagtttttggtgcctgatcctaaagccggagttttttatagaccgttacatttccaatatgtatcgtattctaattttatattgcatcgattgcatgaaatcttgaccgtcaagcggccactcttatcgtttaagaataatacagaacgaattatgatagaaattagcaatgttaaagtgactcctccagattactcacctataatcgcgagtattaaaggtaagagttatgacgcattagccacgttcactgtaaatatctttaaagaggtaatgaccaaagagggtatatccatcactaaaataagtagttatgagggaaaagattctcatttgataaaaattccgctactaataggatacgggaataaaaatccacttgatacagccaagtatcttgttcctaatgtcataggtggagtctttatcaataaacaatctgtcgaaaaagtaggaattaatctagtagaaaagattacaacatggccaaaatttagggttgttaagccaaactcattcactttctcgttttcctccgtatcccctcctaatgtattaccgacaagatatcgccattacaagatatctctggatatatcacaattggaagcgttgaatatatcatcgacaaagacatttataacggtcaatattgttttgctgtctcaatatttatctagagtgagtctagaattcattagacgtagtttatcatacgatatgcctccagaagttgtctatctagtaaacgcgataatagatagtgctaaacgaattactgaatctattactgactttaatattgatacatacattaatgacctggtggaagctgaacacattaaacaaaaatctcagttaacgatcaacgagttcaaatatgaaatgctgcataactttttacctcatatgaactatacacccgatcaactaaagggattttatatgatatctttactaagaaagtttctctactgtatctaccacacttctagatatccagatagagattcgatggtttgtcatcgcatcctaacgtacggcaaatattttgagacgttggcacatgatgaattagagaattacataggcaacatccgaaacgatatcatgaacaatcacaagaacagaggcacttacgcggtaaacattcatgtactaacaactcctggacttaatcatgcattttctagtctattgagtggaaagttcaaaaagtcagacggtagttatcgaacacatcctcactattcatggatgcagaatatttctattcctaggagtgttggattttatccggatcaagtaaagatttcaaagatgttttctgtcagaaaataccatccaagtcaatatctttacttttgttcatcggacgttccggaaagaggtcctcaggtaggtttagtatctcaattgtctgtcttgagttccattacaaatatactaacgtctgagtatttggatttggaaaagaaaatttgtgagtatatcagatcatattataaagatgatataagttactttgaaacaggatttccaatcactatagaaaatgctctagtcgcatctcttaatccaaatatgatatgtgattttgtaactgactttagacgtagaaaacggatgggattcttcggtaacttggaggtaggtattactttagttagggatcacatgaatgaaattcgcattaatattggagcgggaagattagtcagaccattcttggttgtggataacggagagctcatgatggatgtgtgtccggagttagaaagcagattagacgacatgacattctctgacattcagaaagagtttccgcatgtcatcgaaatggtagatatagaacaatttacttttagtaacgtatgtgaatcggttcaaaaatttagaatgatgtcaaaggatgaaagaaagcaatacgatttatgtgactttcctgccgaatttagagatggatatgtagcatcttcactagtgggaatcaatcacaattctggacccagagctattcttggatgtgctcaagctaaacaagctatctcttgtctgagctcggatatacgaaataaaatagacaatggaattcatttgatgtatccagagaggccaatcgtgattagtaaggctttagaaacttcaaagattgcggctaattgcttcggccaacatgttactatagcattaatgtcgtacaaaggtatcaatcaagaggatggaattatcatcaaaaaacaatttattcagagaggcggtctcgatattgttacagccaagaaacatcaagtagaaattccgttggaaaactttaataacaaagaaagagataggtctaacgcctattcaaaattagaaagtaatggattagttagactgaatgctttcttggaatccggagacgctatagcacgaaatatctcatcaagaactcttgaagatgattttgctagagataatcagattagctttgatgtttccgaaaaatataccgatatgtacaaatctcgcgttgaacgagtacaagtagaacttactgacaaagttaaggtacgagtattaaccatgaaagaaagaagacccattctaggagacaaatttaccactagaacgagtcaaaagggaacagtcgcgtatatcgcggatgaaacggaacttccatacgatgaaaatggtatcacaccagatgtcattattaattctacatccatcttctctagaaaaactatatctatgttgatagaggttattttaacagccgcatattctgctaagccgtacaacaataagggagaaaaccgacctgtctgttttcctagtagtaacgaaacatccatcgatacatatatgcaattcgctaaacaatgttatgagcattcaaatccgaaattgtctgatgaagaattatcggataaaatcttttgtgaaaagattctctatgatcctgaaacggataagccttatgcatccaaagtattttttggaccaatttattacttgcgtctgaggcatttaactcaggacaaggcaaccgttagatgtagaggtaaaaagacgaagctcattagacaggcgaatgagggacgaaaacgtggaggaggtatcaagttcggagaaatggagagagactgtttaatagcgcatggtgcagccaatactattacagaagttttgaaagattcggaagaagattatcaagatgtgtatgtttgtgaaaattgtggagacatagcagcacaaatcaagggtattaatacatgtcttagatgttcaaaacttaatctctctcctctcttaacaaaaattgataccacgcacgtatctaaagtatttcttactcaaatgaacgccagaggcgtaaaagttaaattagatttcgaacgaaggcctccttcgttttataaaccattagataaagttgatctcaaaccgtcttttctggtgtaatattctagtttggtagtagatacatatcaatatcatcaaattcgagatccgaattataaaatgggcgtggattgttaactatagaatcggacgtctgatattcgaaaatctgtggagttttaggttttggtggaggtgtaactgctacttgggatactgaagtctgatattcagaaagctgggggatgttctggttcgacatccaccgatggtgtcacatcactaatcggttcggtaacgtctgtggacgatggaggcaccacttctacaggttctggttctttatcctcagtcatcaacggagctacttcaatgcgaggaaatgtataatttggtaatggtttctcatgtggatctgaagaagaggtaagatatctactagaaagataccgatcacgttctagttctcttttgtagaacttaactttttctttctccgcatctagttgatattccaacctcttcacgttcgcatgggttacctccgcagtttttacgagcgatttcacgttcagccttcatgcgtcttatagcatgaattcgcttatcgttatcgggtttagcttctgtcaccttagcaattccttttttattaaactctacataatcatatccatttctattgtttgttctaatataaacgagtatagcatcattgctaaatttttcaatagtatcgaaaacagaatatcctaaaccatataatatatattcaggaacactcaaactaaatgtccaggattctcctaaatacgtaaactttaatagtgcgaaatcattcaaaaatctaccacttatagatagatagatagtacataaatgcgtatagtagtctacctatctctttattatgaaaaccggcattacgatcatatatgtcgtgatatacctgtgatccgtttacgttaaaccataaatacatgggtgatcctataaacatgaatttatttctaattctcagagctatagttaattgaccgtgtaatatttgcttacatgcatacttgatacgatcattaataagatttttatcattgctcgttatttcagaatcgtatatataaggagtaccatcgtgattcttaccagatattatacaaaatactatatataaaatatattgacccacgttagtaatcatgtaaatgtttaacgttttaaattttgtattcaatgatccattatcatacgctagcatggtcttatgatattcattctttaaaatataatattgtgttagccattgcattggggctcctaatggagattttttattctcatccattttaggataggctttcataaagtccctaataacttcgtgaataatgtttctatgttttctactgatgcatgtatttgcttcgatttttttatcccatgtttcatctatcatagatttaaacgcagtaatgctcgcaacattaacatcttgaaccgttggtacaattccgttccataaatttataatgttcgccatttatataactcattttttgaatatacttttaattaacaaaagagttaagttactcatatggacgccgtccagtctgaacatcaatctttttagccagagatatcatagccgctcttagagtttcagcgtgattttccaacctaaatagaacttcatcgttgcgtttacaacacttttctatttgttcaaactttgttgttacattagtaatctttttttccaaattagttagccgttgtttgagagtttcctcattgtcgtcttcatcggctttaacaattgcttcgcgtttagcctctggctttttagcagccgttgtagaaaaaaattcagttgctggaattgcaagatcgtcatctccggggaaaagagttccgtccatttaaagtacagattttagaaactgacactctgcgttatttatatttggtacaacacatggattataaatattgatgttaataacatcagaaaatgtaaagtctatacattgttgcatcgtgttaaattttctaatggatctagtattattgggtccaacttctgcctgaaatccaaatatggaagcggatacaaaaccgtttcctggataaaccacacatctccacttttgctttacatcagaaattgtgtcgttgacatcttgaactctcctatctaatgccggtgttccacctatagattttgaatattcgaatgctgcatgagtagcattaaattccttaatattgccataattttcatatattgagtaaccctggataaaaagtaaacacaccgcagccgtagctaccacaataaaaaaaattgatagagagttcatttataatctattagaagctgacaaaatttttttacacgcatcagacaatgctttaataaatagttcaacatctacttttgtcatatcgaaccgatggtatgattctaacctagaattacatccgaaaaagttgactatgttcatagtcattaagtcattaacaaacaacattccagactctggattataagacgatactgtttcgtcacaattacctaccttaatcatgtgattatgaatattggctattagagcaccttctaagaaatctataatatctttgaaacacgatttaaaatcaaaccacgaatatacttctacgaagaaagttagtttacccataggagaaataactataaatggagatctaaatacaaaatccggatctatgatagttttaacattattatattctctattaaatacctccacatctaaaaatgttaattttgaaactatgtcttcgtttattaccgtacctgaactaaacgctataagctctattgtttgagaactctttaaacgatattcttgaaatacatgtaacaaagtttcctttaactcggtcggtttatctaccatagttacagaatttgtatccttatctataatataataatcaaaatcgtataaagttatataattatcgcgttcagattgggatcttttcaaatagactaaaaaccccatttctctagtaagtatcttatgtatatgtttgtaaaatatcttcatggtgggaatatgctctaccgcagttagccattcctcattgacagcggtagatgtattagacaaaactattccaatgtttaacaagggccattttacgagattattaaatccttgtttgataaatgtagccaatgagggttcgagttcaacgacgattgaattctcttcccgcggatgctgcatgatgaacgacgggatgttgttcgattgatttggaattctttttcgactttttgtttatattaaatattttaaaatttatagcggatagcaattcatgtaccacggataatgtagacgcgtattgcgcatcgatatctttattattagataaatttatcaataaatgtgagaagtttgcctcgttaaggtcttccatttaaatattatataaacatttgtgtttgtatcttattcgtcttttatggaatagttttttactagtaaagctgcaattacacactttgtccgtaaaacataaatataaacaccagcttttatcaatcgttccaaaaagtcgacggcggacatttttaacatggcatctattttaaatacacttaggtttttggaaaaaacatcattttataattgtaacgattcaataactaaagaaaagattaagattaaacataagggaatgtcatttgtattttataagccaaagcattctaccgttgttaaatacttgtctggaggaggtatatatcatgatgatttggttgtattggggaaggtaacaattaatgatctaaagatgatgctattttacatggatttatcatatcatggagtgacaagtagtggaacaatttacaaattgggatcgtctatcgatagactttctctaaataggactattgttacaaaagttaataattataattatgatacattttttgacgatgatgattgatcgctattgcacaattttgtttttttactttctaatatagcgtttagattctttttcatgtgcgaatattgatttactaaaatatctatgtttaacttttgttctataacgtccttatcggcggtatcggtacatatacgtaattcaccttcacaaaatacggagtcttcgataataatagccaatcgattattggatctagctgtctgtatcatattcaacatgtttaatatatcctttcgtttcccctttacaggcatcgatcgtagcatattttccgcgtctgagatggaaatgttaaaactacaaaaatgcgtaatgttagcccgtcctaatattggtacgtgtctataagtttggcatagtagaataatagacgtgtttaaatgccttccaaagtttaagaattctattagagtattgcattttgatagtttatcgcctacatcatcaaaaataagtaaaaagtgtgctgattttttatgattttgtgcgacagcaatacatttttctatgttacttttagttcgtatcagattatattctagagattcctgactactaacgaaattaatatgatttggccaaatgtatccatcataatctggattataaacgggtgtaaacaagaatacatgtttatattttttaactagtgtagaaaacagagatagtaaatagatagtttttccagatccagatcctcccgttaaaaccattctaaacggcatttttaataaattttctcttgaaaattgtttttcttggaaacaattcataattatatttacagttactaaattaatttgataataaatcaaaatatggaaaactaaggtcgttagtagggaggagaacaaagaaggcacatcgtgacataaataacatttattatcatgatgacaccagaaaacgacgaagagcagacatctgtgttctccgctactgtttacagagacaaaattcagggaaagaataaacgcaaacgcgtgattggtctatgtattagaatatctatggttatttcactactatctatgattaccatgtccgcgtttctcatagtgcgcctaaatcaatgcatgtctgctaacgaggctgctattactgacgccgctgttgccgttgctgctgcatcatctactcatagaaaggttgcgtctagcactacgcaatatgatcacaaagaaagctgtaatggtttatattaccagggttcttgttatatattacattcagactaccagttattctcggatgctaaagcaaattgcactgcggaatcatcaacactacccaataaatccgatgtcttgactacctggctcattgattatgttaaggatacatggggatctgatggtaatccaattacaaaaactacatccgattatcaagattctgatgtatcacaagaagttagaaagtatttttgtgttaaaacaatgaactaatatttatttttgtacattaataaatgaaatcgcttaatagacaaactgtaagtaggtttaagaagttgtcggtgccggtcgctataatgatgatactctcaaccattattagtggcataggaacatttctgcattacaaagaagaactgatgcctagtgcttgcgccaatggatggatacaatacgataaacattgttatttagatactaacattaaaatgtctacagataatgcggtttatcagtgtcgtaaattacgagccagattgcctagaccggatactagacatctgagagtattgtttagtattttttataaagattattgggtaagtttaaaaaagaccaatgataaatggttagatattaataatgataaagatatagatattagtaaattaacaaattttaaacaactaaacagtacgacggatgctgaagcgtgttatatatacaagtctggaaaactggttaaaacagtatgtaaaagtactcaatctgtactatgtgttaaaaaattctacaagtgacaacaaaaaatgaattaataataagtcgttaacgtacgccgccatggacgccgcgtttgttattactccaatgggtgtgttgactataacagatacattgtatgatgatctcgatatctcaatcatggactttataggaccatacattataggtaacataaaaactgtccaaatagatgtacgggatataaaatattccgacatgcaaaaatgctactttagctataagggtaaaatagttcctcaggattctaatgatttggctagattcaacatttatagcatttgtgccgcatacagatcaaaaaataccatcatcatagcatgcgactatgatatcatgttagatatagaagataaacatcagccattttatctattcccatctattgatgtttttaacgctacaatcatagaagcgtataacctgtatacagctggagattatcatctaatcatcaatccttcagataatctgaaaatgaaattgtcgtttaattcttcattctgcatatcagacggcaatggatggatcataattgatgggaaatgcaatagtaattttttatcataaaagttgtaaagtaaataataaaacaataaatattgaactagtagtacgtatattgagcaatcagaaatgatgctggtacctcttatcacggtgaccgtagttgcgggaacaatattagtatgttatatattatatatttgtaggaaaaagatacgtactgtctataatgacaataaaattatcatgacaaaattaaaaaagataaagagttctaattccagcaaatctagtaaatcaactgatagcgaatcagactgggaggatcactgtagtgctatggaacaaaacaatgacgtagataatatttctaggaatgagatattggacgatgatagcttcgctggtagtttaatatgggataacgaatccaatgttatggcgcctagcacagaacacatttacgatagtgttgctggaagcacgctgctaataaataatgatcgtaatgaacagactatttatcagaacactacagtagtacttaatgaagataccaaacagaatcctaactattcatccaatcctttcgtaaattataataaaaccagtatttgtagcaagtcaaatccgttcattacagaactcaacaataaatttagtgagaataatccgtttagacgagcacatagcgatgattatcttaataagcaagaacaagatcatgaacacgatgatatagaatcattggtgtgattagtttcctttttataaaattgaagtaatatttagtattattgctgccgtcacgttgtacaaatggagatattccctgtattcggcatttctaaaattagcaattttattgctaataatgactgtagatattatatagatacagaacatcaaaaaattatatctgatgagatcaatagacagatggatgaaacggtacttcttaccaacatcttaagcgtagaagttgtaaatgacaatgagatgtaccatcttattcctcatagattatcgacgattatactctgtattagttctgtcggaggatgtgttatctctatagataatgacgtcaatggcaaaaatattctaacctttcccattgatcatgctgtaatcatatccccactgagtaaatgtgtcgtagttagcaagggtcctacaaccatattggttgttaaagcggatatacctagcaaacgattggtaacatcgtttacaaacgacatactgtatgtaaacaatctatcactgattaattattcgccgttgtctgtattcattattagacgagttaccgactatttggatagacacatatgcgatcagatatttgcgaataataagtggtattccattataaccatcgacaataagcagtttcctattccatcaaactgtataggtatgtcctctgccaagtacataaattctagcatcgagcaagatactttaatacatgtttgtaacctcgagcatccattcgacttagtatacaaaaaaatgcagtcgtacaattctgtacctatcaaggaacaaatattgtacggtagaattgataatataaatatgagcattagtatttctgtggattaatagatttctagtatggggatcattaatcatctctaatctctaaatacctcataaaacgaaaaaaaagctattatcaaatactgtacggaatggattcattctcttctctttttatgaaactctgttgtatatctactgataaaactggaagcaaaaaatctgataaaaagaataagaataagatcaaggattattataaaataacaatagttcctggttcctcttccacgtctactagctcgtggtattatacacatgcctagtaatagtctctttgcgttgacggaaagcagactagaaataacaggctaaaatgttcagacaccataatagttcccaacccagataataacagagtaccatcaacacattcctttaaactcaatcccaaacccaaaaccgttaaaatgtatccggccaattgatagtagataatgaggtgtacagcgcatgatgatttacacagtaaccaaaatgaaaatactttagtaattataagaaatatagatggtaacgtcatcatcaacaatccaataatatgccggagagtaaacattgacggataaaacaaaaatgctccgcataactctatcatggcaataacacaaccaaatacttgtaagattcctaaattagtagaaaatacaacggatatcgatgtataagtgatctcgagaaataataagaataaagtaatgcccgtaaagataaacatcaacattgtttggtaatcattaaaccaattagtatgaagttgaactaatttcacagtagattttattccagtattatccccgcatgtataagtacctggtaagatatctttatattccataatcaatgagacatcactatctgataacgaatgaagtctagcactagtatgccatttacttaatattgtcgtcttggaagttttattataagttaaaatatcatggttatccaatttccatctaatatactttgtcggattatctatagtacacggaataatgatggtatcattacatgctgtatactctatggtctttgtagttgttataacaaccaacgtatagaggtatatcaacgatattctaactcttgacattttttatttatttaaaatgatacctttgttatttattttattctattttgctaacggtattgaatggcataagtttgaaacgagtgaagaaataatttctacttacttattagacgacgtattatacacgggtgttaatggggcggtatacacattttcaaataataaactaaacaaaactggtttaactaataataattatataacaacatctataaaagtagaggatgcggaaccaataacggaaatcccaaatgttggaaaatagacggttcagacgacccaaaacatagaggtagaggatacgctccttatcaaaatagcaaagtaacgataatcagtcacaacggatgtgtactatctgacataaacatatcaaaagaaggaattaaacgatggagaagatttgacggaccatgtggttatgatttatacacggcggataacgtaattccaaaagatggtttacgaggagcattcgtcgataaagatggtacttatgacaaagtttacattcttttcactgatactatcggctcaaagagaattgtcaaaattccgtatatagcacaaatgtgcctaaacgacgaaggtggtccatcatcattgtctagtcatagatggtcgacgtttctcaaagtcgaattagaatgtgatatcgacggaagaagttatagacaaattattcattctagaactataaaaacagataatgatacgatactatatgtattcttcgatagtccttattccaagtccgcattatgtacctattctatgaataccattaaacaatctttttctacgtcaaaattggaaggatatacaaagcaattgccgtctccagctcctggtatatgtttaccagctggaaaagttgttccacataccacgtttgaagtcatagaaaaatataatgtactagatgatattataaagcctttatctaaccaacctatcttcgaaggaccgtctggtgttaaatggttcgatataaaggagaaggaaaatgaacatcgggaatatagaatatacttcataaaagaaaattctatatattcgttcgatacaaaatctaaacaaactcgtagctcgcaagtcgatgcgcgactattttcagtaatggtaacttcgaaaccgttatttatagcagatatagggataggagtaggaatgccacaaatgaaaaaaatacttaaaatgtaatcttaatcgagtacaccgcacgacaatgaacaaacataagacagattatgctggttatgcttgctgcgtaatatgcggtctaattgttggaattatttttacagcgacactattaaaagttgtagaacgtaaattagttcatacaccatcaatagataaaacgataaaagatgcatatattagagaagattgtcctactgactggataagctataataataaatgtatccatttatctactgatcgaaaaacctgggaggaaggacgtaatgcatgcaaagctctaaatccaaattcggatctaattaagatagagactccaaacgagttaagttttttaagaagcattagacgcggatattgggtaggagaatccgaaatattaaaccagacaaccccatataattttatagctaaaaatgccacgaagaatggaactaaaaaacggaaatatatttgtagtacaacgaatactcccaaactacatttttatcataccactacttcggttagatgttttagaaaaaaataaatatcgccgtaccgttcttgtttttataaaaataacaattaacaattatcaaattttttctttaatattttacgtggttgaccattcttggtggtaaaataatctcttagtgttggaatggaatgctgtttaatgtttccgcactcatcgtatattttgacgtatgcagtcacatcgtttacgcaatagtcagactgtagttctatcatgcttcctacatcagaaggaggaacagttttaaagtctcttggttttaatctattgccattagttttcatgaaatcctttgttttatccacttcacattttaaataaatgtccactatacattcttctgttaattttactagatcgtcatgggtcatagaatttataggttccgtagtccatggatccaaactagcaaacttcgcgtatacggtatcgcgattagtgtatacaccaactgtatgaaaattaagaaaacagtttaataaatcaacagaaatatttaatcctccgtttgatacagatgcgccatatttatggatttcggattcacacgttgtttgtctgaggtgttcgtctagtgttgcttctacgtaaacttcgattcccatatattctttattgtcagaatcgcataccgatttatcatcatacactgtttgaaaactaaatggtatacacatcaaaataataaataataacgagtacattctgcaatattgttatcgtaattggaaaaatagtgttcgagtgagttggattatgtgagtattggattgtatattttattttatattttatattttgtagtaagaatagaatgctaatgtcaagtttattccaatagatgtcttattaaaaaacatatataataaataacaatggctgaatggcataaaattatcgaggatatctcaaaaaataataagttcgaggatgccgccatcgttgattacaagactacaaagaatgttctagctgctattcctaacagaacatttgccaagattaatcctctcatcactaatcgtaatattctaaaacctcttattggtcagaaatattgtattgtatatactaactctctaatggatgagaacacgtatgctatggagttgcttactgggtacgcccctgtatctccgatcgttatagcgagaactcataccgcacttatatttttgatgggtaagccaacaacatccagacgtgacgtgtatagaacgtgtagagatcacgctacccgtgtacgtgcaactggtaattaaaataaaaagtaatattcatatgtagtgtcaattttaaatgatgatgatgaaatggataatatccatattgacgatgtcaataatgccggtattggcatacagttcatcgatttttagatttcattcagaggatgtggaattatgttatgggcatttgtattttgataggatctataatgtagtaaatataaaatataatccgcatattccatatagatataattttattaatcgcacgttaaccgtagatgaactagacgataatgtcttttttacacatggttattttttaaaacacaaatatggttcacttaatcctagtttgattgtctcattatcaggaaacttaaaatataatgatatacaatgctcagtaaatgtatcgtgtctcattaaaaatttggcaacgagtacatctactatattaacatctaaacataagacttattctctacatcggtccacgtgtattactataataggatacgattctattatatggtataaagatataaatgacatctatgattttactgcaatatgtatgctaatagcgtctacattgatagtgaccatatacgtgtttaaaaaaataaaaatgaactcttaattatgctatgctattagaaatggataaaatcaaaattacggttgattcaaaaattggtaatgttgttaccatatcgtataacttggaaaagataactattgatgtcacacctaaaaagaaaaaagaaaaggatgtattattagcgcaatcagttgctgtcgaagaggcaaaagatgtcaaggtagaagaaaaaaatattatcgatattgaagatgacgatgatatggatgtagaaagcgcataatacgatctataaaaataagtatataaatactttttatttactgtactcttactgtgtagtggtgataccctactcgattatttttttaaaaaaaaatacttattctgattcttctagccatttccgtgttcgttcgaatgccacatcgacgttaaagataggggagtagttgaaatctagttctgcattgttggtacgcacctcaaatgtagtgttggatatcttcaacgtatagttgttgagtagtgatggttttctaaatagaattctcttcatatcattcttgcacgcgtacatttttagcatccatcttggaatcctagatccttgttctattcccaatggtttcatcaatagaagattaaacatatcgtacgaacacgatggagagtaatcgtagcaaaagtaagcatttcctttaatctcagatcccggatactggatatattttgcagccaacacgtgcatccatgcagcatttcctacatatacccggctatgtaccgcgttatcatcgactgtacgatacataatgttaccgtgttgcttacattgctcgtaaaagactttcatcaatttgtctccttctccgtaaattccagtgggtcttaggcaacaagtatacaattttgctccattcatgattacggaattattggctttcataaccagttgctcggccatacgtttactttttgcgtatacatgtcctggtgatatatcataaagggtatgctcatggccgatgaatggatcaccgtgtttattgggtcctattgcttccatgctactagtatagatcaaatacttgattcctaggtccacacaagctgccaatatagtctgtgttccataatagtttactttcatgatttcattatcggtgtattttccaaatacatccactagagcagctgtatgaataatcagatttaccccatctagcgcttctcttaccttatcaaagtcgtttatatcacattgtatatagtttataaccttaactttcgaggttattggttgtggatcttctacaatatctatgactctgatttcttgaacatcatctgcactaattaacagttttactatatacctgcctagaaatccggcaccaccagtaaccgcgtacacggccattgctgccactcataatatcagactacttattctattttactaaataatggctgtttgtataatagaccacgataatatcagaggagttatttactttgaaccagtccatggaaaagataaagttattggattaaaatccggaacgtatagtttgataattcatcgttacggagatattagtcaaggatgtgattccataggcagtccagaaatatttatcggtaacatctttgtaaacagatatggtgtagcatatgtttatttagatacagatgtaaatatatctacaattattggaaaggcgttatctatttcaaaaaatgatcagagattagcgtgtggagttattggtatttcttacataaatgaaaagataatacattttcttacaattaacgagaatggcgtttgatatatcagttaatgcgtctaaaacaataaatgcattagtttacttttctactcagcaaaataaattagtcatacgtaatgaagttaatgatacacactacactgtcgaatttgatagggacaaagtagttgacacgtttatttcatataatagacataatgactccatagagataagaggggtgcttccagaggaaactaatattggttgcgcggttaatacgccggttagtatgacttacttgtataataagtatagttttaaactgattttagcagaatatataagacacagaaatactatatccggcaatatttattcggcattgatgacactagatgatttggctattaaacagtatggagacattgatctattatttaatgagaaacttaaagtagactccgattcgggactatttgactttgtcaactttgtaaaggatatgatatgttgtgattctagaatagtagtagctctatctagtctagtatctaaacattgggaattgacaaataaaaaatataggtgtatggcattagccgaacatatatctgatagtattccaatatctgagctatctagactacgatacaatctatgtaagtatctacgcgggcacactgagagcatagaggatgaatttgattattttgaagacgatgattcgtctacatgttctgccgtaaccgacagggaaacggatgtataattttttttatagcgtgaaggatatgataaaaaatataattgttgtatttatcccattccaatcaccttatatgattctgtaacacaatgaaggagtcttatagatgtatagaggtcagatactggtttgataaactgtttattccacataagtatgtttgactttatggttagacccgcatactttaacaaatcactgaaaattggagttaggtattgacctctcagaatcagttgccgttctggaacattaaatgtattttttatgatatactccaacgcatttatgtgggcatacaacaagtcattactaatggagtattccaagagaagagatttcaacagactgtttatgaactcgaatgccgcctcattgtcgcttatattgatgatgtcgaattctcccaatatcatcaccgatgagtagctcatcttgttatcgggatccaagttttctaaagatgtcattaaaccctcgatcatgaatggatttatcatcatcgtttttatgttggacatgagcttagtccgtttgtccacatctatagacgacgatttctgaattatttcatatatccctctctttaactccaggaacttgtcaggatggtctactttaatatgttctcgtctaagagatgaaaatctttggatggttgcacgcgacttttctctaaaggatcctctcttaaatgaatccatcttatccttggacaagatggacagtctattttccttagatggtttaatatttttgttacccatgatctataaaggtagacctaatcgtctcggatgaccatatatttattttcagttttattatacgcataaattgtaaaaaatatgttaggtttacaaaaatgtctcgtggggcattaatcgtttttgaaggattggacaaatctggaaaaacaacacaatgtatgaacatcatggaatctataccggcaaacacgataaaatatcttaactttcctcagagatccactgtcactggaaagatgatagatgactatctaactcgtaaaaaaacctataatgatcatatagttaatctattattttgtgcaaatagatgggagtttgcatcttttatacaagaacaactagaacagggaattactttaatagttgatagatacgcattctctggagtagcgtatgccgccgctaaaggcgcgtcaatgactctcagtaagagttatgaatctggattgcctaaacccgacttagttatattcttggaatctggtagcaaagaaattaatagaaacgtcggcgaggaaatttatgaagatgttacattccaacaaaaggtattacaagaatataaaaaaatgattgaagaaggagatattcattggcaaattatttcttctgaattcgaggaagatgtaaagaaggagttgattaagaatatagttatagaggctatacacacggttactggaccagtggggcaactgtggatgtaatagtgaaattacattttttataaatggatgaagcatattactctggcaacttggaatcagtactcggatacgtgtccgatatgcataccgaactcgcatcaatatctcaattagttattgccaagatagaaactatagataatgatatattaaacaaggacattgtaaattttatcatgtgtagatcaaacttggataatccatttatctctttcctagatactgtatatactattatagatcaagagatctatcagaccgaattgattaattcattagacgacaatgaaattatcgattgtatagttaacaagtttatgagcttttataaggataacctagaaaatatagtagatgctatcattactctaaaatatataatgaataatccagattttaaaactacgtatgccgaagtactcggttccagaatagcggatatagatattaaacaagtgatacgtgagaatatactacaattgtctaataatatccgcgaacgatatttgtgaaaatattaaaaaaaaatactttttttattaaatgacgtcgcttcgcgaatttagaaaattatgctgtgatatatatcacgcatcaggatataaagaaaaatctaaattaattagagactttataacagatagggatgataaatatttgatcattaagctattgcttcccggattagacgatagaatttataacatgaacgataaacaaattataaaattatatagtataatatttaaacaatctcaggaagatatgctacaagatttaggatacggatatataggagacactattaggactttcttcaaagagaacacagaaatccgtccacgagataaaagcattttaactttagaagaagtggatagttttttaactacgttatcatccgtaactaaagaatcgcatcaaataaaattattgactgatatcgcatccgtttgtacatgtaatgatttaaaatgtgtagtcatgcttattgataaagatctaaaaattaaagcgggccctcggtacgtacttaacgctattagtcctcatgcctatgatgtgtttagaaaatctaataacttgaaagagataatagaaaatgcatctaaacaaaatctagactctatatctatttctgttatgactccaattaatcccatgttagcggaatcgtgtgattctgtcaataaggcgtttaaaaaatttccatcaggaatgtttgcggaagtcaaatacgatggtgaaagagtacaagttcataaaaataataacgagtttgccttctttagtagaaacatgaaaccagtactctctcataaagtggattatctcaaagaatacataccgaaagcatttaaaaaagctacgtctatcgtattggattctgaaattgttcttgtagacgaacataatgtaccgctcccgtttggaagtttaggtatacacaaaaagaaagaatataaaaactctaacatgtgtttgttcgtgtttgactgtttgtactttgatggattcgatatgacggacattccattgtacgaacgaagatcttttctcaaagatgttatggttgaaatacccaatagaatagtattctcagagttgacgaatattagtaacgagtctcagttaactgacgtattggatgatgcactaacgagaaaattagaaggattggtcttaaaagatattaatggagtatacgaaccgggaaagagaagatggttaaaaataaagcgagactatttgaacgagggttccatggcagattctgccgatttagtagtactaggtgcttactatggtaaaggagcaaagggtggtatcatggcagtctttctaatgggttgttacgacgatgaatccggtaaatggaagacggttaccaagtgttcaggacacgatgataatacgttaagggagttgcaagaccaattaaagatgattaaaattaacaaggatcccaaaaaaattccagagtggttagtagttaataaaatctatattcccgattttgtagtagaggatccaaaacaatctcagatatgggaaatttcaggagcagagtttacatcttccaagtcccataccgcaaatggaatatccattagatttcctagatttactaggataagagaggataaaacgtggaaagaatctactcatctaaacgatttagtaaacttgactaaatcttaatagttacatacaaattaaaataacactatttagttggtggtcgccatggatggtgttattgtatactgtctaaacgcgttagtaaaacatggcgaggaaataaatcatataaaaaatgatttcatgattaaaccatgttgtgaaaaagtcaagaacgttcacattggcggacaatctaaaaacaatacagtgattgcagatttgccatatatggataatgcggtatccgatgtatgcaattcactgtataaaaagaatgtatcaagaatatccagatttgctaatttgataaagatagatgacgatgacaagactcctactggtgtatataattattttaaacctaaagatgccattcctgttattatatccataggaaaggatagagatgtttgtgaactattaatctcatctgataaagcgtgtgcgtgtatagagttaaattcatataaagtagccattcttcccatggatgtttccttttttaccaaaggaaatgcatcattgattattctcctgtttgatttctctatcgatgcggcacctctcttaagaagtgtaaccgataataatgttattatatctagacaccagcgtctacatgacgagcttccgagttccaattggttcaagttttacataagtataaagtccgactattgttctatattatatatggttgttgatggatctgtgatgcatgcaatagctgataatagaacttacgcaaatattagcaaaaatatattagacaatactacaattaacgatgagtgtagatgctgttattttgaaccacagattaggattcttgatagagatgagatgctcaatggatcatcgtgtgatatgaacagacattgtattatgatgaatttacctgatgtaggcgaatttggatctagtatgttggggaaatatgaacctgacatgattaagattgctctttcggtggctggtatttggaaagttttataggtagttgatagaacaaaatacataattttgtaaaaataaatcactttttatactaatatgacacgattaccaatacttttgttactaatatcattagtatacgctacaccttttcctcagacatctaaaaaaataggtgatgatgcaactttatcatgtaatcgaaataatacaaatgactacgttgttatgagtgcttggtataaggagcccaattccattattcttttagctgctaaaagcgacgtcttgtattttgataattataccaaggataaaatatcttacgactctccatacgatgatctagttacaactatcacaattaaatcattgactgctagagatgccggtacttatgtatgtgcattctttatgacatcgcctacaaatgacactgataaagtagattatgaagaatactccacagagttgattgtaaatacagatagtgaatcgactatagacataatactatctggatctacacattcaccggaaactagttctgagaaacctgattatatagataattctaattgctcgtcggtattcgaaatcgcgactccggaaccaattactgataatgtagaagatcatacagacaccgtcacatacactagtgatagcattaatacagtaagtgcatcatctggagaatccacaacagacgagactccggaaccaattactgataaagaagaagatcatacagttacagacactgtctcatacactacagtaagtacatcatctggaattgtcactactaaatcaaccaccgatgatgcggatctttatgatacgtacaatgataatgatacagtaccatcaactactgtaggcggtagtacaacctctattagcaattataaaaccaaggactttgtagaaatatttggtattaccgcattaattatattgtcggccgtggcaatattctgtattacatattatatatataataaacgttcacgtaaatacaaaacagagaacaaagtctagatttttgacttacataaatgtctgggatagtaaaatctatcatattgagcgggccatctggtttaggaaagacagccatagccaaaagactatgggaatatatttggatttgtggtgtcccataccactagatttcctcgtcctatggaacgagaaggtgtcgattaccattacgttaacagagaggccatctggaagggaatagccgccggaacatactgagtttttaggaaatatttacggaacttctaaaactgctgtgaatacagcggctattaataatcgtatttgtgtgatggatctaaacatcgacggtgttagaagttttaaaaatacttacctaatgccttactcggtgtatataagacctacctctcttaaaatggttgagaccaagcttcgttgtagaaacactgaagcggatgatgagattcatcgtcgtgtgatgttggcaaaaactgacatggatgaggcaggtgaagccggtctattcgacactattatcattgaagatgatgtgaatttagcatatagtaagttaattcagatactacaggaccgtattagaatgtattttaacactaattagagacttaagacttaaaacttgataattaataatataactcgtttttatatgtggctatttcaacgtctaatgtattagttaaatattaaaacttaccacgtaaaacttaaaatttaaaatgatatttcattgacagatagatcacacattatgaactttcaaggacttgtgttaactgacaattgcaaaaatcaatgggtcgttggaccattaataggaaaaggtggatttggtagtatttatactactaatgacaataattatgtagtaaaaatagagcccaaagctaacggatcattatttaccgaacaggcattttatactagagtacttaaaccatccgttatcgaagaatggaaaaaatctcacaatataaagcacgtaggtcttatcacgtgcaaggcatttggtctatacaaatccattaatgtggaatatcgattcttggtaattaatagattaggtgcagatctagatgcggtgatcagagccaataataatagattaccaaaaaggtcggtgatgttgatcggaatcgaaatcttaaataccatacaatttatgcacgagcaaggatattctcacggagatattaaagcgagtaatatagtcttggatcaaatagataagaataaattatatctagtggattacggattggtttctaaattcatgtctaatggcgaacatgttccatttataagaaatccaaataaaatggataacggtactctagaatttacacctatagattcgcataaaggatacgttgtatctagacgtggagatctagaaacacttggatattgtatgattagatggttgggaggtatcttgccatggactaagatatctgaaacaaagaattgtgcattagtaagtgccacaaaacagaaatatgttaacaatactgcgactttgttaatgaccagtttgcaatatgcacctagagaattgctgcaatatattaccatggtaaactctttgacatattttgaggaacccaattacgacaagtttcggcacatattaatgcagggtgtatattattaagtgtggtgtttggttgatgtaaaatttttgtcgataaaaattaaaaaataacttaatttattattgatctcgtgtgtacaaccgaaatcatggcgatgttttacgcacacgctctcggtgggtacgacgagaatcttcatgcctttcctggaatatcatcgactgttgccaatgatgtcagtttataataacaagtatgacattgtaaaagacaaatatatgtggtgttacagtcaggtgaacaagagatatattggagcactgctgcctatgtttgagtgcaatgaatatctacaaattggagatccgatccatgatcaagaaggaaatcacatatcgccacaaaaactactatgctctaagcggaatcgggtacgagagtctagacttgtgtttggaaggagtagggattcatcatcacgtacttgaaacagaaaacgctgtatatggaaaagttcaacatgattattctactatcaaagagaaggccaaagaaatgaatgcactcagttcaggacctatcatcgattaccacgtctggataggagattgtatctgtcaagttactgctgtggacgtacatggaaaggaaattatgagaatgagattcaaaaagggtgcggtgcttccgatcccaaatctggtaaaagttaaacttggggagaatgatacagaaaatctttcttctactatatcggcggcaccatcgaggtaaccacctctctggaagacagtgtgaatcatgtactcatgaaacgtttggaatctatacgccatatgtggtctgttgtatatgatcattttgatattgtgaatggtaaagaatgctgttatgtgcatacgcatttgtctaatcaaaatcttataccgagtactgtaaaaacaaatttgtacatgaagactatgggatcatgcattcaaatgagtatcttagcgaactgaaggaatcaggtggatggagtcccagaccagaaatgcaggaatttgaatatccagatggagtggaagacactgaatcaattgagagattggtagaggagttcttcaatagatcagaacttcaggctggtaaatctattaatgttaaacatacatctgtttcagctaagcaactaagaacacgtatactctcatcttttgccaacacagagggtggatatttgttcattggagttgataataatacacacaaagtatttggattcacggtgggttacgactacctcagactgatagagaatgatatagaaaagcatatcaaaagactttgtgttgtgtatttctgtgagaagaaagaggacatcaagtacacgtgtcgattcatcaaggtatataaacctggggatgaggctacctcgacatacgtgtgcgctatcaaagtggaaagatgctgttgtgctgtgtttgcagattggccagaatcatggtatcaagaagtattctccagatgaataggtgtcacatataaaattttaattaatgtaactatagagaacaaataataggttgtaatatcatatagacaataactaacaattaattagtaactgttatctctttttaactaactaactatacctattaatacatcgtaattatagttcttaacatctattaatcattgattcgcttctttaattttttataaaccaacattgttaattgaaaagggataacatgttacagaatataaattatatatggattttttttaaaaaggaaatacttgactggagtgtatatttatctcttcattatatagcacgcgtgttttccaatttttccacatcccatataatacaggattataatctcgttcgaacatacgagaaagtggataaaacaatagttgattttttatctaggttgccaaatttattccatattttagaatatggggaaaatattctacatatttattctatggatgatgctaatacgaatattataattttttttctagatagagtattaaatattaataagaacgggtcatttatacacaatctcaggttatcatcatccattaatataaaagaatatgtatatcaattagttaataatgatcatccagataataggataagactaatgcttgaaaatggacgtagaacaagacattttttgtcctatatatcagatacagttaatatctatatatgtattttatatagatgccgaagacagttacggttgtacattattacatagatgtatatatcactataagaaatcagaatcagaatcagaatcatacaatgaattaattaagatattgttaaataatggatcagatgtagataaaaaagatacgtacggaaacacaccttttatcctattatgtaaacacgatatcaacaacgtggaattgtttgagatatgtttagagaatgctaatatagactctgtagactttaatagatatacacctcttcattatgtctcatgtcgtaataaatatgattttgtaaagttattaatttctaaaggagcaaatgttaatgcgcgtaataaattcggaactactccattttattgtggaattatacacggtatctcgcttataaaactatatttggaatcagacacagagttagaaatagataatgaacatatagttcgtcatttaataatttttgatgctgttgaatctttagattatctattatccagaggagttattgatattaactatcgtactatttacgacgctgtcagttataatgcgtataatacgttggtctatctattaaacagaaatggtgattttgagacgattactactagtggatgtacatgtatttcggaagcagtcgcaaacaacaacaaaataataatggaagtactattgtctaaacgaccatctttgaaaattatgatacagtctatgatagcaattactaaacataaacagcataatgcagatttattgaaaatgtgtataaaatatactgcgtgtatgaccgattatgatactcttatagatgtacaatcactacagcaatataaatggtatattttaagatgtttcgatgaaatagatatcatgaagagatgttatataaaaaataaaactgtattccaattagttttttgtatcaaagacattaatactttaatgagatacggtaaacatccttctttcgtgaagtgcactagtctcgacgtatacggaagtcgtgtacgtaatatcatagcatctattagatatcgtcagagattaattagtctattatccaagaagctggatcctggagataaatggtcgtgttttcctaacgaaataaaatataacgataacgaactgtccacatatctaaaaatcttataaacactattaaaatataaaatcacactacatcattgtttccttttagtgctcgacagtgtatactatttttaacgctcataaataaaaatgaaaacgatttccgttgttacgttgttatgcgtactacctgctgttgtttattcaacatgtactgtacccactatgaataacgctaaattaacgtctaccgaaacatcgtttaataataaccagaaagttacgtttacatgtgatcagggatatcattcttcggatccaaatgctgtctgcgaaacagataaatggaaatacgaaaatccatgcaaaaaaatgtgcacagtttctgattacatctctgaactatataataaaccgctatacgaagtgaattccaccatgacactaagttgcaacggcgaaacaaaatattttcgttgcgaagaaaaaaatggaaatacttcttggaatgatactgttacgtgtcctaatgcggaatgtcaacctcttcaattagaacacggatcgtgtcaaccagttaaagaaaaatactcatttggggaatatataactatcaactgtgatgttggatatgaggttattggtgcttcgtacataagttgtacagctaattcttggaatgttattccatcatgtcaacaaaaatgtgatataccgtctctatctaatggattaatttccggatctacattttctatcggtggcgttatacatcttagttgtaaaagtggttttatactaacgggatctccatcatccacatgtatcgacggtaaatggaatcccatactcccaacatgtgtacgatctaacgaaaaatttgatccagtggatgatggtcccgacgatgagacagatttgagcaaactctcgaaagacgttgtacaatatgaacaagaaatagaatcgttagaagcaacttatcatataatcatagtggcgttaacaattatgggcgtcatatttttaatctccgttatagtattagtttgttcctgtgacaaaaataatgaccaatataagttccataaattgctaccgtgaatataaatccgttaaaataatgaataattaataattaataatttaataacaaacaagtatcaaaagattaaagacttatagctagaatcaattgagatgtcttcttcagtggatgttgatatctacgatgccgttagagcatttttactcaggcactattataacaagagatttattgtgtatggaagaagtaacgccatattacataatatatacaggctatttacaagatgcgccgttataccgttcgatgatatagtacgtactatgccaaatgaatcacgtgttaaacaatgggtgatggatacacttaatggtataatgatgaatgaacgcgatgtttctgtaagcgttggcaccggaatactattcatggaaatgtttttcgattacaataaaaatagtatcaacaatcaactaatgtatgatataattaatagcgtatctataattctagctaatgagagatatagaagcgcttttaacgacgatggtatatacatccgtagaaatatgattaacaagttgtacggatacgcatctctaactactattggcacgatcgctggaggtgtttgttattatctgttgatgcatctagttagtttgtataaataattatttcaatatactagttaaaattttaagattttaaatgtataaaaaactaataacgtttttatttgtaataggtgcattagcatcctattcgaataatgagtacactccgtttaataaactgagtgtaaaactctatatagatggagtagataatatagaaaattcatatactgatgataataatgaattggtgttaaattttaaagagtacacaatttctattattacagagtcatgcgacgtcggatttgattccatagatatagatgttataaacgactataaaattattgatatgtctactattcaacgcagaggtcacacgtgtagaatatctaccaaattatcatgccattatgataagtacccttatattcacaaatatgatggtgatgagcgacaatattctattactgcagagggaaaatgctataaaggaataaaatatgaaataagtatgatcaacgatgatactctattgagaaaacatactcttaaaattggatctacttatatatttgatcgtcatggacatagtaatacatattattcaaaatatgatttttaaaaatttaaaatatattatcacttcagtgacagtagtcaaataacaaacaacaccatgagatatattataattctcgcagttttgttcattaatagtatacacgctaaaataactagttataagtttgaatccgtcaattttgattccaaaattgaatggactggggatggtctatacaatatatcccttaaaaattatggcatcaagacgtggcaaacaatgtatacaaatgtaccagaaggaacatacgacatatccgcatttccaaagaatgatttcgtatctttctgggttaaatttgaacaaggcgattataaagtggaagagtattgtacgggaccaccgactgtaacattaactgaatacgacgaccatccgtatgctactagaggtagcaaaaagattcctatttacaaacgcggtgacatgtgtgatatctacttgttgtatacggctaacttcacattcggagattctaaagaaccagtaccatatgatatcgatgactacgattgcacgtctacaggttgcagcatagactttgtcacaacagaaaaagtgtgcgtgacagcacagggagccacagaagggtttctcgaaaaaattactccatggagttcgaaagtatgtctgacacctaaaaagagtgtatatacatgcgcaattagatccaaagaagatgttcccaatttcaaggacaaaatggccagagttatcaagagaaaatttaactaaatttctcggtagcacatcaaatgatgttaccacttttcttagcatgcttaacttgactaaatattcataactaatttttattaatgatacaaaaacgaaataaaactgcatattatacactggttaacgcccttataggctctaaccattttcaagatgaggtccctgattatagtccttctgttcccctctatcatctactccatgtctattagacgatgtgagaagactgaagaggaaacatggggattgaaaatagggttgtgtataattgccaaagatttctatcccgaaagaactgattgcagtgttcatctcccaactgcaagtgaaggcaatggattcagggatatacgaaacaccgataaattataaaaaaagcaatgtgtccgctgtttccgttaataatactattttcgtaactggcggattattcataaataactctaatagcacgatcgtggttaacaatatggaaaaacttgacatttataaagacaaacaatggtcgattatagaaatgcctatggctagggtatatcacggcatcgactcgacatttggaatgttatattttgccggaggtctatccgttaccgaacaatatggtaatttagagaaaaacaacgagatatcttgttacaatcctagaacgaataagtggtttgatatttcatatactatttataagatatccatatcatcattgtgtaaactaaataacgtcttctatgtatttagtaaggacattggatatgtggaaaagtatgatggtctccccgctataaaggcattatcaacttctccttattgattgaaaatgaaaatataaatagtttttatgtatagcagtattaccctatagttttattgcttactactaacatggatacagatacagatgttacaaatgtagaagatatcatgaatgaaatagatagagagaaagaagaaatactaaaaaatgtagaaattgaaaataataaaaacattaacaagaatcatcccaatgaatatattagagaagcactcgttattaatacaagtagtaatagtgattccattgataaagaagttatagaatgtatcagtcacgatgtaggaatatagatcatatctactaatttttataatcaatacaaaacataaaaaacaactcgttattacatagcaggcatggaatccttcaagtattgttttgataacgatggcaagaaatggattatcggaaatactttatattctggtaattcaatactctataaggtcagaaaaaatttcactagttcgttctacaattacgtaatgaagatagatcacaaatcacacaagccattgttgtctgaaatacgattctatatatctgtattggatcctttgactatcgacaactggacacgggaacgtggtataaagtatttggctattccagatctgtatggaattggagaaaccgatgattatatgttcttcgttataaagaatttgggaagagtattcgccccaaaggatactgaatcagtcttcgaagcatgcgtcactatgataaacacgttagagtttatacactctcgaggatttacccatggaaaaatagaaccgaggaatatactgattagaaataaacgtctttcactaattgactattctagaactaacaaactatacaagagtggaaactcacatatagattacaacgaggacatgataacttcaggaaatatcaattatatgtgtgtagacaatcatcttggagcaacagtttcaaaacgaggagatttagaaatgttgggatattgcatgatagaatggttcggtggcaaacttccatggaaaaacgaaagtagtataaaagtaataaaacaaaaaaaagaatataaaaaatttatagctactttctttgaggactgttttcctgaaggaaatgaacctctggaattagttagatatatagaattagtatacacgttagattattctcaaactcctaattatgacagactacgtagactgtttatacaagattgaaatattctttttttatagagtgtggtagtgttacggatatctaatattaatattagactatctctatcgcgctacacgaccaatatcgattactatggatatcttctatgaaaggagagaatgtattcatttctccagcgtcaatctcgtcagtattgacaatactgtattatggagctaatggatccactgctgaacagctatcaaaatatgtagaaaaggaggagaacacggataaggttagcgctcagaatatctcattcaaatccatgaataaagtatatgggcgatattctgccgtgtttaaagattcctttttgagaaaaattggcgataagtttcaaactgttgacttcactgattgtcgcactatagatgcaatcaacaagtgtgtagatatctttactgaggggaaaatcaatccactattggatgaacaattgtctcctagcaattagtgccgtatactttaaagcaaaatggttgacgccattcgaaaaggaatttaccagtgattatcccttttacgtatcaccaacggaaatggtagacgtaagtatgatgtctatgtacggcgagctatttaatcacgcatctgtaaaagaatcattcggtaacttttcaatcatagaactgccatatgttggagatactagtatgatggtcattcttccagacaagattgatggattagaatccatagaacaaaatctaacagatacaaattttaagaaatggtgtaactctctggaagctacgtttatcgatgttcacattcccaagtttaaggtaacaggctcgtataatctggtggatactctagtaaagtcaggactgacagaggtgttcggttcaactggagattatagcaatatgtgtaatttagatgtgagtgtcgacgctatgatccacaaaacgtatatagatgtcaatgaagagtatacagaagcagctgcagcaacttgtgcactggtgtcagactgtgcatcaacaattacaaatgagttctgtgtagatcatccgttcatctatgtgattaggcatgttgatggaaaaatttttttcgttggtagatattgctctccgacaactaattgttaaccattttttttaaaaaaatagaaaaaacatgtggtattagtgcaggtcgttattcttccaattgcaattggtaagatgacggccaactttagtacccacgtcttttcaccacagcactgtggatgtgacagactgaccagtattgatgacgtcaaacaatgtttgactgaatatatttattggtcgtcctatgcataccgcaacaggcaatgcgctggacaattgtattccacactcctctcttttagagatgatgcggaattagtgttcatcgacattcgcgagctggtaaaaaatatgccgtgggatgatgtcaaagattgtgtagaaatcatccgttgttatataccggatgagcaaaaaaccatcatcggactttgtgcatatgctgctacttactggggaggtgaagaccatcccactagtaacagtctgaacgcattgtttgtgatgcttgagatgctaaattacgtggattataacatcatattccggcgtatgaattgatgagttgtacatcttgacattttcttctttcttctcttctccctttcccagaaacaaactttttttacccactataaaataaaatgagtatactacctgttatatttctttctatatttttttattcttcattcgttcagacttttaacgcgcctgaatgtatcgacaaagggcaatattttgcatcattcatggagttagaaaacgagccagtaatcttaccatgtcctcaaataaatacgctatcatccggatataatatattagatattttatgggaaaaacgaggagcggataatgatagaattataccgatagataatggtagcaatatgctaattctgaacccgacacaatcagactctggtatttatatatgcattaccacgaacgaaacctactgtgacatgatgtcgttaaatttgacaatcgtgtctgtctcagaatcaaatatagatcttatctcgtatccacaaatagtaaatgagagatctactggcgaaatggtatgtcccaatattaatgcatttattgctagtaacgtaaacgcagatattatatggagcgggcatcgacgccttagaaataagagacttaaacaacggacacctggaattattaccatagaagatgttagaaaaaatgatgctggttattatacatgtgttttagaatatatatacggtggcaaaacatataacgtaaccagaattgtaaaattagaggtacgggataaaataataccttctactatgcaattaccagaaggtgttgtaacttcaataggtagtaatttgactattgcgtgtagagtatcgttgagacctcccacaacggatgcagacgtcttttggataagtaatggtatgtattacgaagaagatgatggggacggagacggtagaataagtgtagcaaataaaatctatatgaccgataagagacgtgttattacatcccggttaaacattaatcctgtcaaggaagaagatgctacaacgtttacgtgtatggcgtttactattcctagcatcagcaaaacagttactgttagtataacgtgaatgtatgttgttacatttccatgtcaattgagtttataagaatttttatacattatcttccaacaaacaattgacgaacgtattgctatgattaactcccacgatactatgcatattattaatcattaacttgcagactatacctagtgctattttgacatactcatgttcttgtgtaattgcggtatctatattattaaagtacgtaaatctagctatagttttattatttaattttagataatataccgtctccttatttttaaaaattgccacatcctttattaaatcatgaatgggaatttctatgtcatcgttaatatattgtgaacaacaagagcagatatctataggaaagggtggaatgcgatacattgatctatgtagttttaaaacacacgcgaactttgaagaatttatataaatcattccatcgatacatccttctatgttgacatgtatatatccaggaattcttttattaatgtcaggaaatgtataaactaaaacattgcccgaaagcggtgcctctatctgcgttatatccgttcttaacttacaaaatgtaaccaatacctttgcatgacttgttttgttcggcaacgttagtttaaacttgacgaatggattaattacaatagcatgatccgcgcatctattaagtttttttactttaacgcccttgtatgtttttacagagactttatctaaatttctagtgcttgtatgtgttataaatataacgggatatagaactgaatcacctaccttagatacccaattacattttatcagatccagataataaacaaattttgtcgccctaactaattctatattgttatatattttacaattggttatgatatcatgtaataacttggagtctaacgcgcatcgtcgtacgtttatacaattgtgatttagtgtagtatatctacacatgtatttttccgcactatagtattctggactagtgataaaactatcgttatatctgtcttcaatgaactcatcgagatattgctctctgtcatattcatacacctgcataaactttctagacatcttacaatccgtgttattttaggatcatatttacatatttacgggtatatcaaagatgttagattagttaatgggaatcgtctataataatgaatattaaacaattatatgaggacttttaccacaaagcatcataaaaatgagtcgtcgtctgatttatgttttaaatatcaaccgcgaatcaactcataaaatacaagagaatgaaatatatacatattttagtcattgcaatatagaccatacttctacagaacttgattttgtagttaaaaactatgatctaaacagacgacaacctgtaactgggtatactgcactacactgctatttgtataataattactttacaaacgatgtactgaagatattattaaatcatggagtggatgtaacgatgaaaaccagtagcggacgtatgcctgtttatatattgcttactagatgttgtaatatttcacatgatgtagtgatagatatgatagacaaagataaaaaccacttatcgcatagagactattccaacctactactagagtatataaaatctcgttacatgttattgaaggaagaggatatcgatgagaacatagtatccactttattagataagggaatcgatcctaactttaaacaagacggatatacagcgttacattattattatttgtgtctcgcacacgtttataaaccaggtgagtgtagaaaaccgataacgataaaaaaggccaagcgaattatttctttgtttatacaacatggagctaatctaaacgcgttagataattgtggtaatacaccattccatttgtatcttagtattgaaatgtgtaataatattcatatgactaaaatgctgttgacttttaatccgaatttcaaaatatgtaataatcatggattaacgcctatactatgttatataacttccgactacatacaacacgatattcttgttatgttaatacatcactatgaaacaaatgttggagaaatgccgatagatgagcgtcgtataatcgtattcgagtttatcaaaacatattctacacgtccggcagattcgataacttatttgatgaataggtttaaaaatatagatatttatacccgctatgaaggaaagacattattacacgtagcatgtgaatataataatacacacgtaatagattatcttatacgtatcaacggagatataaatgcgttaaccgacaataacaaacacgctacacaactcattatagataacaaagaaaattccccatataccattaattgtttactgtatatacttagatatattgtagataagaatgtgataagatcgttggtggatcaacttccatctctacctatcttcgatataaaatcatttgagaaattcatatcctactgtatacttttagatgacacattttacaatagacacgttaggaatcgcaattctaaaacgtatcgatacgcattttcaaaatacatgtcgtttgataaatacgatggtataataactaaatgtcataaagaaacaatattgctcaaactatccactgttctagacactacactatatgcagttttaagatgccataattcgaaaaagttaagaagatacctcaacgagttaaaaaaatataataacgataagtcctttaaaatatattctaatattatgaatgagagataccttaatgtatattataaagatatgtacgtgtcaaaggtatatgataaactatttcctgttttcacagataaaaattgtctactaacattactaccttcagaaattatatacgaaatattatacatgctgacaattaacgatctttataatatatcgtatccacctaccaaagtatagttgtatttttctcatgcgatgtgtgtaaaaaaactgatattatataaatattttagtgccgtataatgaagatgacgatgaaaatgatggtacatatatatttcgtatcattattgttattgctattccacagttacgccatagacatcgaaaatgaaatcacagaattcttcaataaaatgagagatactctaccagctaaagactctaaatggttgaatccagcatgtatgttcggaggcacaatgaatgatatagccgctctaggagagccattcagcgcaaagtgtcctcctattgaagacagtcttttatcgcacagatataaagactatgtggttaaatgggagaggctagaaaaaaatagacggcgacaggtttctaataaacgtgttaaacatggtgatttatggatagccaactatacatctaaattcagtaaccgtaggtatttgtgtaccgtaactacaaagaatggtgactgtgttcagggtatagttagatctcatattaaaaaacctccttcatgcattccaaaaacatatgaactaggtactcatgataagtatggcatagacttatactgtggaattctttacgcaaaacattataataatataacttggtataaagataataaggaaattaatatcgacgatattaagtattcacaaacgggaaagaaattaattattcataatccagagttagaagatagtggaagatacaactgttacgttcattacgacgacgttagaatcaagatgtaaaatacttacggttataccgtcgcaagaccacaggtttaaactaatactagatccaaaaatcaacgtaacgataggagaacctgccaatataacatgcactgctgtgtcaacgtcattattgattgacgatgtactgattgaatgggaaaatccatccggatggcttataggattcgattttgatgtatactctgttttaactagtagaggcggtatcaccgaggcgaccttgtactttgaaaatgttactgaagaatatataggtaatacatataaatgtcgtggacacaactattattttgaaaaaacccttacaactacagtagtattggagtaaatacacaatgcatttttatatacattactgaataattattattattatttatatcgtatttgtgctataacgcgactatctaggtatttgtatctcaccgatagagaacatataaatgtagactctattaaacagttgtgtaaaatatcagatcctaatagatgtggatgtacggctttagaaatgagttcattaaaatatgtgatatcaacggaacatatttatataattatactattgctgttagtataattattgattccacggaagaactaccaacagttactccaattacaacaacatataattatactatcgatgatagcactactgaagaactacaagtgactcctcatatggatctccatcgatgatacatgtattaaaatactttccgaataagtcttttaaatattgtattaattatgaaaaactatgctatgcgagtatgatacgatactagattttatctctagcgagagatgtcgttagaatcatttatcaacgaatatcgataacatgtgtcatttatacgttaaagtctgtccgtcttctctattgtttagactgtttgtagaatgctgtgatataaacaaactagtagacacaaatatttaactcatgatgaagttgagaatgatatgctttagctaatataaaaatatattaatccactatatattctagacttgatttaaaaccgataaactactactacgtactgtataagttaggagcagaccctaattatgtagatgatagaggtaatacttctgcatctatatgtccacttatgagaaaacgtcatttaataagatgcatcgtgaaaagaaatttattaaagagttggtaaaatatgaaaccgaaagtaaataatataggaaatacacctctacataactacgtatctcaatatgatatcactctcattcctcatccacaacccattaaaaaatggaaattaaagccctctattagcataaacggctacaggtctacctttacaatggcctttccttgtgcccagttcagaccctgtcattgccacgctactaaggactccctgaataccgtggccgacgtcagacattgtctgactgaatacatcctgtgggtttctcatagatggacccatagagaaagcgcagggtctctctacaggcttctcatctctttcagaactgatgcaacggagctctttggtggtgagttgaaggattcacttccgtggagatcattaaatgactccatgaaaaccgccgaagaacttcgtgcaatcattggactttgtactcaatcagctatcgtctctggaagagtcttcaacgataagtatatcgacatactacttatgctgcgaaagattctgaacgagaacgactatctcaccctcttggatcatatccgcactgctaaatactaaatctccttcatgctctctcactacactttttatcatcttatgaggaataattagcaccagaatagctatggattgcacatgtattctatgtcgtctactggatgaagatgtgacgtacaaaaaaataaaactagaaattgaaacgtgtcacaacttatcaaaacatatagatagacgaggaaacaatgcgctacattgttacgtctccaataaatgcgatacagacattaagattgttcgactgttactctctcgcggagtcgagagactttgtagaaacaacgaaggattaactccgctaggagcatacagtaagcatagatacgtaaaatctcagattgtgcatctactgatatccagctattcgaattcctctaacgaactcaagtcgaatataaatgatttcgacttacgtctgctaaaatacctaattgtggataaacggatacgtccgtccaagaatacgaattatgcaatcaatggtctcggattggtggatatatacgtaacgacgcctaatccgagaccagaagtattgctatggcttcttaaatcagaatgttacagcaccggttacgtatttcgtacctgtatgtacaacagtgatatgtgtaagaactctcttcattactatatatcgtctcatagagaatctctatccaaggatgtaattaaatgtttgatcgataacaatgtttccatccaatactactggtcttgctcaaccatagatatagagattattaataaaggatgtggacacgtgtagagtatacgacgtcagccctatattagaggcgtattatctaaacaagcgatttagagtaaccccatataatgtagacatggaaatcgttaatcttcttattgagagacgtcatactcttgtcgacgtaatgcgtagtattacttcgtacgattccagagaatataaccactacatcatcgataacattctaaagagatttagacaacaggatgaatccatcgtacaagccatactgataaactacttacattacggcgatatggtaagtatacctatcattcaatgcatgttggataagacgacggacaacaactttgttaataataatctcgtcgatgtaaacgtcgtaaggtttatcgtggaaaatatggacacgcggctgtaaatcacatatctaacaatggccgtctatgtatgtacggtctgatattatcgagatttaataattgcgggtatcactgttatgaagatgtatttgatatactaagcaagtacatggatgatatagatatgatcgataactctactatattacgcggtcgatgtcaataatatacaatttgcaaagcggttattggaatatggagcgagtgtcacgctcgataatcaatacggccatccagaaaagcagttaccaaagagaagctagttgatttattactgagttaccatcccactctagagactatgattgacgcatttaatagagatatacgctatctatatcctgaaccattattcgcctgtatcagatacgccttaatcctagatgatgattttccttctaaagtaagtatgatatcgccggtcgtcataaggaactaaagcgctatagagcagacattaatagaatgaagaatgcctacatatcaggcgtctccatgtttgatatattatttaaacgaagcaaacgccacagattgagatacgcaaagaacaatgagaggatcgactccattaaataatttatcatggagtgataatgtcctgtttccatggcatattacaaaatcgattccgtccaagatgataaaaacatttaccggcatcataaacacggagtttattttatatgtctcgcataaacattactaaaaaaatatattgttcggttttctttcacatctttaattatgaaaaagtaaatcattatgagatggacgcatcgttcgcgacagtatgtggtacatacctaacgtatttatggacgacggtaagaatgaaggtcacgtttctgtcaacaatgtcgacgcgatcgtgtaacacgactcacaatagaatctgtgaatgctctcccgatcatggatgcaaggcatgtgtttcccaaacaaaatgtggaataggatacggagtatccggagacgtcatctgttctccgtgtggtctcggaacatattctcacaccgtctcttccgcagataaatgcgaacccgtacccagaaatacctttaactatatcgatgtggaaattaacctgtatccagttaacgacacatcgtgtactcggacgaccactaccggtctcagcgaatccatctcaacgtcggaactaactattactatgaatcataaagactgcgatcccgtcttcttaataaggtagcgacttcaggtttctttacaggagaaaggtgtgcactctgaatttcgagattaaatgcaataacaaagattcttcctccaaacagttaacgaaagcaaagaatgatactatcatgccgcattcggagacagtaactctagcgtcgacatctatatactatatagtaataccaatactcaagactacgaaactgatacaatctcttatcatgtgggtaatgtagccatatgcccggtagttgcgatatacataaactgatcactaattccaaacccacccgctttttatagtaagtttttcacccataaatacaataattaatttctcgtaaaagtagaaaatatattctaatttattgcacggtaaggaagtagaatcataaagaacagtactcaatcaatagcaatcatgaaacaatatatcgtactggcatgcatgtgcctgccagtcttcagcaatcatcctcatcgtgtacggaagaagaaaacaaacatcatatgggaatcgatgttattatcaaagtcacaaagcaagaccaaacaccgaccgatgataagatttgccaatccgtaacggaaattacagagtccgagtcagatccagatcccgaggtggaatcagtcgaggatgtagatcctcctaccacttattactccatcatcggtggaggtctgagaatgaactttggattcaccaaatgtcctcagattaaatccatctcagaatccgctgatggaaagactgtgaggtgtctatcgacatcagatgtagcgaagaagagaaagacagcgacatcaagacccatccagtactcgggtctaacatctctcataagaaagtgagttacgaagatatcatcggttcaacgatcgtcgatacaaaatgtgtcaagaatctagagtttagcgttcgtatcggagacatgtgcaaggaatcatctgaacttgaggtcaagtatgtcgacggatcggcatctgaaggtgcaaccgatgatacttcactcatcgattcaacaaaactcaaagcgtgtgtctgaatcgataactctattcatctgaaattggatgagtagggttaatcgaacgattcaggcacaccacgaattaaaaaagtgtaccggacactatattccggtttgcaaaacaaaaagttacctctcgcgacttcttctttttctgtctcaatagtgtgatacgattatgacactattcctatttcctttcagggtatcacaaaaatattaaacctctttctgatggtctcatacaaaaatatttttattctctttctctctttgatggtctcataaaaaatatttttattctctttctctctttgatggtctcataaaatatttttattctctttctctctttgatggtctcataaaaaatatttttattctctttctctctttgatggtctcataaaatatttttattctctttctctctttgatggtctcataaaaaatatttttattctctttctctctttgatggtctcataaaaaatattaaacctctttctgatggtgtcactaaaatatttttattctctttctctcttcaatggagtcataaaatatttttattctctttctctcttcgatggtctcacaaaaatattaaacctctttctgatggtgtcactaaaatatttttattctctttctctcttcaatggagtcataaaatatttttattctctttctctctttgatggtctcacaaaaatatttttattctctttctctctttgatggtctcacaaaaatatttttattctctttctctctttgatggtctcacaaaaatatttttattctctttctctctttgatggtctcataaaaaaagttttacaaaaatatttttattctctttctctctttgatggtctcataaaaaaagttttacaaaaatatttttattctctttctctctttgatggtctcataaaaaaagttttacaaaaatatttttattctctttctctctttgatggtctcataaaaaatattaaacctctttctgatggtgtcactaaaatatttttattctcattctctcttcaatggagtcataaaatatttttattctctttctctcttcgatggtctcacaaaaatattaaacctctttctgatggtgtcactaaaatatttttattctcattctctcttcaatggagtcataaaatatttttattctctttctctcttcgatggtctcacaaaaatattaaacctctttctgatggtgtcactaaaatatttttattctcattctctcttcaatggagtcataaaatatttttattctctttctctctttgatggtctcataaaaaaagttttacaaaaatatttttattctctttctctctttgatggtctcataaaaaatattaaacctctttctgatggtgtcactaaaatatttttattctctttctctcttcaatggagtcataaaatatttttattctctttctctcttcgatggtctcacaaaaatattaaacctctttctgatggtgtcactaaaatatttttattctcattctctcttcaatggagtcataaaatatttttattctctttctctctttgatggtctcataaaaaaagttttacaaaaatatttttattctctttctctctttgatggtctcataaaaaaagttttacaaaaatatttttattctctttctctctttgatggtctcataaaaaaagttttacaaaaatatttttattctctttctctctttgatggtctcataaaaaaagttttacaaaaatatttttattctctttctctctttgatggtctcataaaaaatattaaacctctttctgatggtgtcactaaaatatttttattctcattctctcttcaatggagtcataaaatatttttattctctttctctcttcgatggtctcacaaaaatattaaacctctttctgatggtgtcactaaaatatttttattctcattctctcttcaatggagtcataaaatatttttattctctttctctctttgatggtctcataaaaaaagttttacaaaaatatttttattctctttctctctttgatggtctcataaaaaaagttttacaaaaatatttttattctctttctctctttgatggtctcataaaaaaagttttacaaaaatatttttattctctttctctctttgatggtctcataaaaaaagttttacaaaaatatttttattctctttctctctttgatggtctcacaaaaatattaaacctctttctgatggagtcgtaaaaaagttttatctctttctccttcgatggtctcacaaaaatattaaacctctttctgatggagtcgtaaaaaagttttatctctttctctcttcgatggtctcacaaaaatattaaacctctttctgatggagtcgtaaaaaagttttatctctttctctcttcgatggtctcactaaaatattttttattctctttctgatgcatcaactatttcttaaacaataacgtccaacaacatatactcgtcgagcttatcaacatcccctatgcccatctaggttaccagacaattgtatatcataaaataatgtttataatttttacaaaaatatttttattctctttctctctttgatggtctcataaaaaaagttttacaaaaatatttttattctctttctctctttgatggtctcataaaaaatattaaacctctttctgatggtgtcactaaaatatttttattctcattctctcttcaatggagtcataaaatatttttattctctttctctcttcgatggtctcacaaaaatattaaacctctttctgatggtgtcactaaaatatttttattctcattctctcttcaatggagtcataaaatatttttattctctttctctctttgatggtctcataaaaaaagttttacaaaaatatttttattctctttctctctttgatggtctcataaaaaaagttttacaaaaatatttttattctctttctctctttgatggtctcataaaaaaagttttacaaaaatatttttattctctttctctctttgatggtctcataaaaaaagttttacaaaaatatttttattctctttctctctttgatggtctcataaaaaaagttttacaaaaatatttttattctctttctctctttgatggtctcataaaaaaagttttacaaaaatatttttattctctttctctctttgatggtctcataaaaaaagttttacaaaaatatttttattctctttctctctttgatggtctcataaaaaatattaaacctctttctgatggtgtcactaaaatatttttattctctttctctcttcaatggagtcataaaatatttttattctctttctctcttcgatggtctcacaaaaatattaaacctctttctgatggtgtcactaaaatatttttattctcattctctcttcaatggagtcataaaatatttttattctctttctctctttgatggtctcataaaaaaagttttacaaaaatatttttattctctttctctctttgatggtctcataaaaaaagttttacaaaaatatttttattctctttctctctttgatggtctcataaaaaaagttttacaaaaatatttttattctctttctctctttgatggtctcataaaaaaagttttacaaaaatatttttattctctttctctctttgatggtctcataaaaaaagttttacaaaaatatttttattctctttctctctttgatggtctcataaaaaatattaaacctctttctgatggtgtcactaaaatatttttattctctttctctcttcaatggagtcataaaatatttttattctctttctctcttcgatggtctcacaaaaatattaaacctctttctgatggtgtcactaaaatatttttattctctttctctcttcaatggagtcataaaatatttttattctctttctctctttgatggtctcataaaaaaagttttacaaaaatatttttattctctttctctctttgatggtctcataaaaaaagttttacaaaaatatttttattctctttctctctttgatggtctcataaaaaaagttttacaaaaatatttttattctctttctctctttgatggtctcataaaaaaagttttacaaaaatatttttattctctttctctctttgatggtctcataaaaaaagttttacaaaaatatttttattctctttctctctttgatggtctcataaaaaaagttttacaaaaatatttttattctctttctctctttgatggtctcataaaaaaagttttacaaaaatatttttattctctttctctctttgatggtctcataaaaaatattaaacctctttctgatggtgtcactaaaatatttttattctcattttctctttctctcttcaatggagtcataaaatatttttattctctttctctctttgatggtctcataaaaaatattaaacctctttctgatggtgtcactaaaatatttttattctcattctctcttcaatggagtcataaaaaagttttatctctttctctcttcgatggtctcacaaaaatattaaacctctttctgatggagtcgtaaaaaagttttatctctttctctcttcgatggtctcacaaaaatattaaacctctttctgatgcatcaactatttcttaaacaataacgtccaacaacatatactcatcccctatgcccatctaggttaccagacaattgtatatcataaaataatgtttataatttacacgttaaaatcatataataaaacgtagatcgtataatattttttggtatataaatgatctagtaaaatccatgtaggggatactgctcacattttttctttggtacaaaatttcacacaagtttttatacagacaaattcttgtccatatattttaaaacattgacttttgtactaagaaaaatatctagactaactatctctttctctttctctcttcgatggtctttctgatggagtcgtaaaaaagttttatctctttctctcttcgatggtctcacaaaaatattaaacctctttctgatggagtcgtaaaaaagttttatctctttctctcttcgatggtctcacaaaaatattaaacctctttctgatggagtcgtaaaaaagttttatctctttctccttcgatggtctcacaaaaatattaaacctctttctgatggagtcgtaaaaaagttttatctctttctctcttcgatggtctcacaaaaatattaaacctctttctgatggtgtcactaaaatatttttattctctttctctcttcgatggtctcacaaaaatattaaacctctttctgatggagtcgtaaaaaagttttatctctttctccttcgatggtctcacaaaaatattaaacctctttctgatggagtcgtaaaaaagttttatctctttctctcttcgatggtctcacaaaaatattaaacctctttctgatggagtcgtaaaaaagttttatctctttctccttcgatggtctcacaaaaatattaaacctctttctgatggagtcgtaaaaaagttttatctctttctccttcgatggtctcacaaaaatattaaacctctttctgatggagtcgtaaaaaagttttatctctttctccttcgatggtctcacaaaaatattaaacctctttctgatggagtcgtaaaaaagttttatctctttctctcttcgatggtctcacaaaaatattaaacctctttctgatggagtcgtaaaaaagttttatctctttctctcttcgatggtctcacaaaaatattaaacctctttctgatggagtcgtaaaaaagttttatctctttctccttcgatggtctcacaaaaatattaaacctctttctgatggtctctataaagcgattgatttttcttaccctctagagtttcctacggtcgttggtcacacatttttttctagacactaaataaatagtaagattaaattaattataaaattatgtatataatattaattataaaattatgtatatgatttactaactttagttagataaattaataatacataaattttagtatattaatattataaattaataatacataaattttagtatattaatattatattttaaatatttatttagtgtctagaaaaaaaggccggcctagcaggcc

SEQ ID NO: 15 - DNA, 62068 bp, Artificial Sequence
  sMVA F3
ggcctagcaggcctttttttctagacactaaataaatagtaagattaaattaattataaaattatgtatataatattaattataaaattatgtatatgatttactaactttagttagataaattaataatacataaattttagtatattaatattataaattaataatacataaattttagtatattaatattatattttaaatatttatttagtgtctagaaaaaaaggccggccgggtattaataatatctatatttccagcgttaagtgtaacattaaacagttttaattcacgtgacgtggtatcaattaaataattaatgcccaatttggatatagcagcctgaagctcatcttgtttagttacggatcctaatgagttattaagcaatatatcgaacggatgaacgaaggttgttttaagttggtcacatactttgtaatctagacatagatgcggaagaacggtagaaactatacgaaataaatattcagagtcctctaattgatcaagagtaactattgacttaataggcatcatttatttagtattaaatgacgaccgtaccagtgacggatatacaaaacgatttaattacagagttttcagaagataattatccatctaacaaaaattatgaaataactcttcgtcaaatgtctattctaactcacgttaacaacgtggtagatagagaacataatgccgccgtagtgtcatctccagaggaaatatcctcacaacttaatgaagatctatttccagatgatgattctccggccactattatcgaacgagtacaacctcatactactattattgacgatactccacctcctacgtttcgtagagagttattgatatcggaacaacgtcaacaacgagaaaaaagatttaatattacagtatcgaaaaatgctgaagcaataatggaatctagatctatgatatcttctatgccaacacaaacaccatccttgggagtagtttatgataaagataaaagaattcagatgttggaggatgaagtggttaatcttagaaatcaacgatctaatacaaaatcatctgataatttagataattttaccagaatactatttggtaagactccgtataaatcaacagaagttaataagcgtatagccatcgttaattatgcaaatttgaacgggtctcccttatcagtcgaggacttggatgtttgttcagaggatgaaatagatagaatctataaaacgattaaacaatatcacgaaagtagaaaacgaaaaattatcgtcactaacgtgattattattgtcataaatattatcgagcaagcattgctaaaactcggatttgaagaaatcaaaggactgagtaccgatatcacttcagaaattatcgatgtggagatcggagatgactgcgatgctgtagcatcaaaactaggaatcggtaacagtccggttcttaatattgtattgtttatactcaagatattcgttaaacgaattaaaattatttaatttaatacattcccatatccagacaacaatcgtctggattaatctgttcctgtcgtctcataccggacgacatattaatctttttattagtaggcatctttttagatggtttctttttcccagcattaactgagtcgatacctagaagatcgtgattgatctctccgaccattccacgaacttctaattggccgtctctgacggtaccataaactattttaccagcattagtaacagcttggacaatctgaccatccatcgcattgtacgatgtagtagtaactgttgttctacgtctaggagcaccagaagtatttttggagcccttggatgttgatgtagaagaagacgaggattttgattttggtttacatgtaatacattttgtatcacatgcgccggcagtcacatctgtttgagaattaagattattgttgcctcctttgacggctgcatctccaccgatttgcgctagtagatttttaagctgtggtgtaatcttattaactgtttcgatataatcatcgtaactgcttctaacggctaaattttttttatccgccatttagaagctaaaaatatttttatttatgcagaagatttaactagattatacaatgaactaatatgatccttttccagattatttacaaacttggtattttttggttctggaggaggcgaatttaaattcggacttggatttggattttgtgggttcttgatcttattatacagcgcatataggatggcgacggtaactgctacgcaaataccgatcaacaaaagaataccaatcatttattgacaataacttcactattgatcaagtatgcaatatatcatcttttcactaaataagtagtaataatgattcaacaatgtcgagatatatggacgataataatttagttcatggaaatatcgctatgattggtatgaatgactccgctaactctgtggggcgcgcagtgctttccccacatagaataaattagcattccgactgtgataataataccaagtataaacgccataatactcaatactttccatgtacgagtgggactggtagacttactaaagtcaataaaggcgaagatacacgaaagaatcaaaagaatgattccagcgattagcacgccggaaaaataatttccaatcataagcatcatatccatttaactaataaaaattttaaatcgccgaatgaacaaagtggaatataaaccatataaaaacaatagtttgtactgcaaaaataatatctatttttgttttcgaagatatggtaaaattaaatagtagtacacagcatgttataactaacagcagcaacggctcgtaattacttatcatttactagacgaaaaggtggtgggatattttcttgctcaaataatacgaatatatcacccatccattttatgcgatgtttatatactctaatctttaatagatctatagacgacgggtttaccaacaatatagattttatcgattcatctaatttaaacccttccttaaacgtgaatgatctattatctggcataacgatgactctacccgatgaatcggacaatgtactgggccatgtagaataaattatcaacgaattatcgtctacgaacatttatatcatttgttttaattttagtacgcgaataaatagatataaaatagaaaataacagatattacaaccaatgttatggccgcgcccaaccaggtaggcagttttattttatcttttactacaggttctcctggatgtacgtcaccaacggcggacgtagttctagtacaattagacgtaagttccgcttgggaattttttaacgctaaagagttaacgttaatcgtgcacccaacgtatttacatctagttctttgaacatcttgattataatataaccattttctatctctagattcgtcggtgcactcatgtaaccaacataccctaggtcctaaatatttatctccggaattagattttggataattcgcgcaccaacaatttctatttcctttatgatcgttacaaaagacgtataatgccgtatccccaaaagtaaaataatcaggacgaataattctaataaactcagaacaatatctcgcatccatatgtttggagcaaatatcggaataagtagacatagccggtttccgttttgcacgtaaccattctaaacaattggggtttccaggatcgtttctacaaaatccagtcatgaaatcatcacaatgttctgtcttgtaattattattaaatatttttggacagtgtttggtatttgtcttagaacaacattttgccacgctatcactatcgcccaggagataatccttttttataaaatgacatcgttgcccggatgctatataatcagtagcgtgttttaaatccttaatatattcaggagttacctcgttctgataatagattaatgatccaggacgaaatttgaaagaactacatggttctccatgaattaatacatattgtttagcaaattcaggaactataaaactactacaatgatctatcgacataccatctatcaaacaaaacttgggtttaatttctcccggagatgtttcataatagtacgtataactttcttctgcaaacttaacagctctattatattcaggataattaaaacctaattccatatatttgtctcgtatatctgctattcctggtgctattttgattctattaagagtaacggctgcccccatttttaataatcgtcagtatttaaactgttaaatgttggtatatcaacatttaccttatttcccgcagtataaggtttgttgcaggtatactgttcaggaatggttacatttatactttttctatagtcctgtctttcgatgttcatcacatatgcaaagaacagaataaacaaaataatgtaagaaataatattaaatatctgtgaattcgtaaatacattgattgccataataattacagcagctacaatacatacaatagacattcccacagtgttgccattacctccacgatacatttgagttactaagcaataggtaataactaagctagtaagaggcaatagaaaagatgagataaatatcatcaatatagagattagaggagggctatatagagccaagacgaacaaaatcaaaccgagtaacgttctaacatcattatttttgaagattcccaaataatcattcattcctccataatcgttttgcatcatacctccatctttaggcataaacgattgctgctgttcctctgtaaataaatctttatcaagcactccagcacccgcagagaagtcgtcaagcatattgtaatatcttaaataactcatttatatattaaaaaatgtcactattaaagatggagtataatctttatgccgaactaaaaaaaatgacttgtggtcaacccctaagtctttttaacgaagacggggatttcgtagaagttgaaccgggatcatcctttaagtttctgatacctaagggattttacgcctctccttccgtaaagacgagtctagtatttgaaacattaacaacgaccgataataaaattactagtatcaatccaacaaatgcgccaaagttatatcctcttcaacgcaaagtcgtatctgaagtagtttctaatatgaggaaaatgatcgaatcaaaacgtcctctatacatcactcttcacttggcgtgtggatttggtaagactattaccacgtgttatcttatggctacacacggtagaaaaaccgtcatttgcgtacccaataaaatgttaatacatcaatggaagacacaggtagaggcagtcggattggaacataagatatccatagatggagtaagtagtctattaaaggaactaaagactcaaagtccggatgtattaatagtagtcagtagacatctgacaaacgatgccttttgtaaatatatcaataagcattatgatttgttcatcttggatgaatcacatacgtataatctgatgaacaatacagcagttacaagatttttagcgtattatcctccgatgatgtgttattttttaactgctacacctagaccatctaacagaatttattgtaacagtattattaatattgccaagttatccgatctaaaaaaaactatctatgcagtagatagtttttttgagccatattccacagataatattagacatatgataaaacgattagatggaccatctaataaatatcatatatataccgagaagttattatctgtagacgagcctagaaatcaacttattcttaataccctggtagaagaattcaagtcaggaactattaatcgcattttagttattactaaactacgtgaacatatggtattcttctacaaacgattattagattttttcggatcagaggttgtatttataggagacgcccaaaatagacgtactccagatatggtcaaatcaatcaaggaactaaatagatttatattcgtatccaccttattttattccggtactggtttagatattcctagtttggattctttgttcatttgctcggcagtaatcaacaatatgcaaatagagcaattactagggagggtatgtcgagaaacagaactattagataggacggtatatgtatttcctagcacatccatcaaagaaataaagtacatgataggaaatttcgttcaacgaattattagtctgtctgtagataaactaggatttaaacaaaaaagttatcggaaacatcaagaatccgatcccacttctgtatgtacaacatcctccagagaagaacgtgtattaaatagaatatttaactcgcaaaatcgttaagaagtttaagcgacgatccgcatgctgcgcaggccagtgtattacccctcatagtattaatataatccaatgatacttttgtgatgtcggaaatcttaaccaatttagactgacaggcagaacacgtcatgcaatcatcatcgtcatcgataactgtagtcttgggcttctttttgcggctcttcattccggaacgcacattggtgctatccatttaggtagtaaaaaataagtcagaatatgccctatagcacgatcgtgcaaaacctggtatatcgtctctatctttatcacaatatagtgtatcgacatctttattattattgacctcgtttatcttggaacatggaatgggaacatttttgttatcaacggccacctttgccttaattccagatgttgtaaaattataactaaacagtctatcatcgacacaaatgaaattcttgtttagacgtttgtagtttacgtatgcggctcgttcgcgtctcattttttcagatattgcaggtactataatattaaaaataagaatgaaataacataggattaaaaataaagttatcatgacttctagcgctgatttaactaacttaaaagaattacttagtctgtacaaaagtttgaaattttcagattctgcggctatagaaaagtataattctttggtagaatggggaacatctacttactggaaaataggcgtgcaaaaggtagctaatgtcgagacgtcaatatctgattattatgatgaggtaaaaaataaaccgtttaatattgatccgggctattacattttcttaccggtatattttgggagcgtctttatttattcgaagggtaaaaatatggtagaacttggatctggaaactcttttcaaataccagatgatatgcgaagtgcgtgtaacaaagtattagacagcgataacggaatagactttctgagatttgttttgttaaacaatagatggataatggaagatgctatatcaaaatatcagtctccagttaatatatttaaactagctagtgagtacggattaaacatacccaaatatttagaaattgaaatagaggaagacacattatttgacgacgagttatactctattatagaacgctctttcgatgataaatttccaaaaatatccatatcgtatattaagttgggagaacttaggcggcaagttgtagactttttcaaattctcattcatgtatattgagtccatcaaggtagatcgtataggagataatatttttattcctagcgttataacaaaatcaggaaaaaagatattagtaaaagatgtagaccatttaatacgatccaaggttagagaacatacatttgtaaaagtaaaaaagaaaaacacattttccattttatacgactatgatggaaacggaacagaaactagaggagaagtaataaaacgaattatagacactataggacgagactattatgttaacggaaagtatttctctaaggttggtagtgcaggcttaaagcaattgactaataaattagatattaatgagtgcgcaactgtcgatgagttagttgatgagattaataaatccggaactgtaaaacgaaaaataaaaaaccaatcagcatttgatttaagcagagaatgtttgggatatccagaagcggattttataacgttagttaataacatgcggttcaaaatagaaaattgtaaggttgtaaatttcaatattgaaaatactaattgtttaaataacccgagtattgagactatatatggaaactttaaccagttcgtctcaatctttaatatcgtcaccgatgtcaaaaaaagattattcgagtgaaataatatgcgcctttgatataggtgcaaaaaatcctgccagaactgttttagaagtcaaggataactccgttagggtattggatatatcaaaattagactggagttctgattgggaaaggcacatagctaaagatttgtcacaatatgaatacactacagttcttctagaacgtcagcctagaaggtcgccgtacgtcaaatttatctattttattaaaggctttttatatcatacatcggctgccaaagttatttgcgtctcgcctgtcatgtctggtaattcatatagagatcgaaaaaagagatcggtcgaagcatttcttgattggatggacacattcggattgcgagactccgttccggatagacgcaaattagacgatgtagcggatagtttcaatttggctatgagatacgtattagataaatggaatactaattatacaccttataataggtgtaaatctagaaattacataaaaaaaatgtaataacgttagtaacgccattatggataatctatttacctttctacatgaaatagaagatagatatgccagaactatttttaactttcatctaataagttgcgatgaaataggagatatatatggtcttatgaaagaacgcatttcctcagaggatatgtttgataatatagtgtataataaagatatacatcatgccattaagaaactagtgtattgcgacatccaacttactaaacacattattaatcagaatacgtatccggtatttaacgattcttcacaagtgaaatgttgtcattatttcgatataaactcagataatagcaatattagctctcgtacagtagagatatttgagagggaaaagtcatctcttgtatcatatattaaaactaccaataagaagagaaaggtcaattatggggaaataaagaaaactgtacatggaggcactaatgcaaattacttttccggtaaaaagtctgatgagtatctgagcactacagtcaggtccaacattaatcaaccttggatcaaaaccatttctaagagaatgagagtagatatcattaatcactctatagtaacgcgtggaaaaagctctatattacaaactatagaaattatttttactaatagaacatgtgtgaaaatattcaaggattctactatgcacattattctatccaaggacaaggatgaaaaggggtgtatacacatgattgacaaattattctatgtctattataatttatttctgttgttcgaggatatcatccaaaacgagtactttaaagaagtagctaatgttgtaaaccacgtactcacggctacggcattagatgagaaattattcctaattaagaaaatggctgaacacgatgtttatggagttagcaatttcaaaatagggatgtttaacctgacatttattaagtcgttggatcataccgttttcccctctctgttagatgaggatagcaaaataaagttttttaaggggaaaaagctcaatattgtagcattacgatctctggaggattgtataaattacgtgactaaatccgagaatatgatagaaatgatgaaggaaagatcgactattttaaatagcatagatatagaaacggaatcggtagatcgtctaaaagaattgcttctaaaatgaaaaaaaaacactaattcagaaatggatcaacgactcggatataagtttttggtgcctgatcctaaagccggagttttttatagaccgttacatttccaatatgtatcgtattctaattttatattgcatcgattgcatgaaatcttgaccgtcaagcggccactcttatcgtttaagaataatacagaacgaattatgatagaaattagcaatgttaaagtgactcctccagattactcacctataatcgcgagtattaaaggtaagagttatgacgcattagccacgttcactgtaaatatctttaaagaggtaatgaccaaagagggtatatccatcactaaaataagtagttatgagggaaaagattctcatttgataaaaattccgctactaataggatacgggaataaaaatccacttgatacagccaagtatcttgttcctaatgtcataggtggagtctttatcaataaacaatctgtcgaaaaagtaggaattaatctagtagaaaagattacaacatggccaaaatttagggttgttaagccaaactcattcactttctcgttttcctccgtatcccctcctaatgtattaccgacaagatatcgccattacaagatatctctggatatatcacaattggaagcgttgaatatatcatcgacaaagacatttataacggtcaatattgttttgctgtctcaatatttatctagagtgagtctagaattcattagacgtagtttatcatacgatatgcctccagaagttgtctatctagtaaacgcgataatagatagtgctaaacgaattactgaatctattactgactttaatattgatacatacattaatgacctggtggaagctgaacacattaaacaaaaatctcagttaacgatcaacgagttcaaatatgaaatgctgcataactttttacctcatatgaactatacacccgatcaactaaagggattttatatgatatctttactaagaaagtttctctactgtatctaccacacttctagatatccagatagagattcgatggtttgtcatcgcatcctaacgtacggcaaatattttgagacgttggcacatgatgaattagagaattacataggcaacatccgaaacgatatcatgaacaatcacaagaacagaggcacttacgcggtaaacattcatgtactaacaactcctggacttaatcatgcattttctagtctattgagtggaaagttcaaaaagtcagacggtagttatcgaacacatcctcactattcatggatgcagaatatttctattcctaggagtgttggattttatccggatcaagtaaagatttcaaagatgttttctgtcagaaaataccatccaagtcaatatctttacttttgttcatcggacgttccggaaagaggtcctcaggtaggtttagtatctcaattgtctgtcttgagttccattacaaatatactaacgtctgagtatttggatttggaaaagaaaatttgtgagtatatcagatcatattataaagatgatataagttactttgaaacaggatttccaatcactatagaaaatgctctagtcgcatctcttaatccaaatatgatatgtgattttgtaactgactttagacgtagaaaacggatgggattcttcggtaacttggaggtaggtattactttagttagggatcacatgaatgaaattcgcattaatattggagcgggaagattagtcagaccattcttggttgtggataacggagagctcatgatggatgtgtgtccggagttagaaagcagattagacgacatgacattctctgacattcagaaagagtttccgcatgtcatcgaaatggtagatatagaacaatttacttttagtaacgtatgtgaatcggttcaaaaatttagaatgatgtcaaaggatgaaagaaagcaatacgatttatgtgactttcctgccgaatttagagatggatatgtagcatcttcactagtgggaatcaatcacaattctggacccagagctattcttggatgtgctcaagctaaacaagctatctcttgtctgagctcggatatacgaaataaaatagacaatggaattcatttgatgtatccagagaggccaatcgtgattagtaaggctttagaaacttcaaagattgcggctaattgcttcggccaacatgttactatagcattaatgtcgtacaaaggtatcaatcaagaggatggaattatcatcaaaaaacaatttattcagagaggcggtctcgatattgttacagccaagaaacatcaagtagaaattccgttggaaaactttaataacaaagaaagagataggtctaacgcctattcaaaattagaaagtaatggattagttagactgaatgctttcttggaatccggagacgctatagcacgaaatatctcatcaagaactcttgaagatgattttgctagagataatcagattagctttgatgtttccgaaaaatataccgatatgtacaaatctcgcgttgaacgagtacaagtagaacttactgacaaagttaaggtacgagtattaaccatgaaagaaagaagacccattctaggagacaaatttaccactagaacgagtcaaaagggaacagtcgcgtatatcgcggatgaaacggaacttccatacgatgaaaatggtatcacaccagatgtcattattaattctacatccatcttctctagaaaaactatatctatgttgatagaggttattttaacagccgcatattctgctaagccgtacaacaataagggagaaaaccgacctgtctgttttcctagtagtaacgaaacatccatcgatacatatatgcaattcgctaaacaatgttatgagcattcaaatccgaaattgtctgatgaagaattatcggataaaatcttttgtgaaaagattctctatgatcctgaaacggataagccttatgcatccaaagtattttttggaccaatttattacttgcgtctgaggcatttaactcaggacaaggcaaccgttagatgtagaggtaaaaagacgaagctcattagacaggcgaatgagggacgaaaacgtggaggaggtatcaagttcggagaaatggagagagactgtttaatagcgcatggtgcagccaatactattacagaagttttgaaagattcggaagaagattatcaagatgtgtatgtttgtgaaaattgtggagacatagcagcacaaatcaagggtattaatacatgtcttagatgttcaaaacttaatctctctcctctcttaacaaaaattgataccacgcacgtatctaaagtatttcttactcaaatgaacgccagaggcgtaaaagttaaattagatttcgaacgaaggcctccttcgttttataaaccattagataaagttgatctcaaaccgtcttttctggtgtaatattctagtttggtagtagatacatatcaatatcatcaaattcgagatccgaattataaaatgggcgtggattgttaactatagaatcggacgtctgatattcgaaaatctgtggagttttaggttttggtggaggtgtaactgctacttgggatactgaagtctgatattcagaaagctgggggatgttctggttcgacatccaccgatggtgtcacatcactaatcggttcggtaacgtctgtggacgatggaggcaccacttctacaggttctggttctttatcctcagtcatcaacggagctacttcaatgcgaggaaatgtataatttggtaatggtttctcatgtggatctgaagaagaggtaagatatctactagaaagataccgatcacgttctagttctcttttgtagaacttaactttttctttctccgcatctagttgatattccaacctcttcacgttcgcatgggttacctccgcagtttttacgagcgatttcacgttcagccttcatgcgtcttatagcatgaattcgcttatcgttatcgggtttagcttctgtcaccttagcaattccttttttattaaactctacataatcatatccatttctattgtttgttctaatataaacgagtatagcatcattgctaaatttttcaatagtatcgaaaacagaatatcctaaaccatataatatatattcaggaacactcaaactaaatgtccaggattctcctaaatacgtaaactttaatagtgcgaaatcattcaaaaatctaccacttatagatagatagatagtacataaatgcgtatagtagtctacctatctctttattatgaaaaccggcattacgatcatatatgtcgtgatatacctgtgatccgtttacgttaaaccataaatacatgggtgatcctataaacatgaatttatttctaattctcagagctatagttaattgaccgtgtaatatttgcttacatgcatacttgatacgatcattaataagatttttatcattgctcgttatttcagaatcgtatatataaggagtaccatcgtgattcttaccagatattatacaaaatactatatataaaatatattgacccacgttagtaatcatgtaaatgtttaacgttttaaattttgtattcaatgatccattatcatacgctagcatggtcttatgatattcattctttaaaatataatattgtgttagccattgcattggggctcctaatggagattttttattctcatccattttaggataggctttcataaagtccctaataacttcgtgaataatgtttctatgttttctactgatgcatgtatttgcttcgatttttttatcccatgtttcatctatcatagatttaaacgcagtaatgctcgcaacattaacatcttgaaccgttggtacaattccgttccataaatttataatgttcgccatttatataactcattttttgaatatacttttaattaacaaaagagttaagttactcatatggacgccgtccagtctgaacatcaatctttttagccagagatatcatagccgctcttagagtttcagcgtgattttccaacctaaatagaacttcatcgttgcgtttacaacacttttctatttgttcaaactttgttgttacattagtaatctttttttccaaattagttagccgttgtttgagagtttcctcattgtcgtcttcatcggctttaacaattgcttcgcgtttagcctctggctttttagcagccgttgtagaaaaaaattcagttgctggaattgcaagatcgtcatctccggggaaaagagttccgtccatttaaagtacagattttagaaactgacactctgcgttatttatatttggtacaacacatggattataaatattgatgttaataacatcagaaaatgtaaagtctatacattgttgcatcgtgttaaattttctaatggatctagtattattgggtccaacttctgcctgaaatccaaatatggaagcggatacaaaaccgtttcctggataaaccacacatctccacttttgctttacatcagaaattgtgtcgttgacatcttgaactctcctatctaatgccggtgttccacctatagattttgaatattcgaatgctgcatgagtagcattaaattccttaatattgccataattttcatatattgagtaaccctggataaaaagtaaacacaccgcagccgtagctaccacaataaaaaaaattgatagagagttcatttataatctattagaagctgacaaaatttttttacacgcatcagacaatgctttaataaatagttcaacatctacttttgtcatatcgaaccgatggtatgattctaacctagaattacatccgaaaaagttgactatgttcatagtcattaagtcattaacaaacaacattccagactctggattataagacgatactgtttcgtcacaattacctaccttaatcatgtgattatgaatattggctattagagcaccttctaagaaatctataatatctttgaaacacgatttaaaatcaaaccacgaatatacttctacgaagaaagttagtttacccataggagaaataactataaatggagatctaaatacaaaatccggatctatgatagttttaacattattatattctctattaaatacctccacatctaaaaatgttaattttgaaactatgtcttcgtttattaccgtacctgaactaaacgctataagctctattgtttgagaactctttaaacgatattcttgaaatacatgtaacaaagtttcctttaactcggtcggtttatctaccatagttacagaatttgtatccttatctataatataataatcaaaatcgtataaagttatataattatcgcgttcagattgggatcttttcaaatagactaaaaaccccatttctctagtaagtatcttatgtatatgtttgtaaaatatcttcatggtgggaatatgctctaccgcagttagccattcctcattgacagcggtagatgtattagacaaaactattccaatgtttaacaagggccattttacgagattattaaatccttgtttgataaatgtagccaatgagggttcgagttcaacgacgattgaattctcttcccgcggatgctgcatgatgaacgacgggatgttgttcgattgatttggaattctttttcgactttttgtttatattaaatattttaaaatttatagcggatagcaattcatgtaccacggataatgtagacgcgtattgcgcatcgatatctttattattagataaatttatcaataaatgtgagaagtttgcctcgttaaggtcttccatttaaatattatataaacatttgtgtttgtatcttattcgtcttttatggaatagttttttactagtaaagctgcaattacacactttgtccgtaaaacataaatataaacaccagcttttatcaatcgttccaaaaagtcgacggcggacatttttaacatggcatctattttaaatacacttaggtttttggaaaaaacatcattttataattgtaacgattcaataactaaagaaaagattaagattaaacataagggaatgtcatttgtattttataagccaaagcattctaccgttgttaaatacttgtctggaggaggtatatatcatgatgatttggttgtattggggaaggtaacaattaatgatctaaagatgatgctattttacatggatttatcatatcatggagtgacaagtagtggaacaatttacaaattgggatcgtctatcgatagactttctctaaataggactattgttacaaaagttaataattataattatgatacattttttgacgatgatgattgatcgctattgcacaattttgtttttttactttctaatatagcgtttagattctttttcatgtgcgaatattgatttactaaaatatctatgtttaacttttgttctataacgtccttatcggcggtatcggtacatatacgtaattcaccttcacaaaatacggagtcttcgataataatagccaatcgattattggatctagctgtctgtatcatattcaacatgtttaatatatcctttcgtttcccctttacaggcatcgatcgtagcatattttccgcgtctgagatggaaatgttaaaactacaaaaatgcgtaatgttagcccgtcctaatattggtacgtgtctataagtttggcatagtagaataatagacgtgtttaaatgccttccaaagtttaagaattctattagagtattgcattttgatagtttatcgcctacatcatcaaaaataagtaaaaagtgtgctgattttttatgattttgtgcgacagcaatacatttttctatgttacttttagttcgtatcagattatattctagagattcctgactactaacgaaattaatatgatttggccaaatgtatccatcataatctggattataaacgggtgtaaacaagaatacatgtttatattttttaactagtgtagaaaacagagatagtaaatagatagtttttccagatccagatcctcccgttaaaaccattctaaacggcatttttaataaattttctcttgaaaattgtttttcttggaaacaattcataattatatttacagttactaaattaatttgataataaatcaaaatatggaaaactaaggtcgttagtagggaggagaacaaagaaggcacatcgtgacataaataacatttattatcatgatgacaccagaaaacgacgaagagcagacatctgtgttctccgctactgtttacagagacaaaattcagggaaagaataaacgcaaacgcgtgattggtctatgtattagaatatctatggttatttcactactatctatgattaccatgtccgcgtttctcatagtgcgcctaaatcaatgcatgtctgctaacgaggctgctattactgacgccgctgttgccgttgctgctgcatcatctactcatagaaaggttgcgtctagcactacgcaatatgatcacaaagaaagctgtaatggtttatattaccagggttcttgttatatattacattcagactaccagttattctcggatgctaaagcaaattgcactgcggaatcatcaacactacccaataaatccgatgtcttgactacctggctcattgattatgttaaggatacatggggatctgatggtaatccaattacaaaaactacatccgattatcaagattctgatgtatcacaagaagttagaaagtatttttgtgttaaaacaatgaactaatatttatttttgtacattaataaatgaaatcgcttaatagacaaactgtaagtaggtttaagaagttgtcggtgccggtcgctataatgatgatactctcaaccattattagtggcataggaacatttctgcattacaaagaagaactgatgcctagtgcttgcgccaatggatggatacaatacgataaacattgttatttagatactaacattaaaatgtctacagataatgcggtttatcagtgtcgtaaattacgagccagattgcctagaccggatactagacatctgagagtattgtttagtattttttataaagattattgggtaagtttaaaaaagaccaatgataaatggttagatattaataatgataaagatatagatattagtaaattaacaaattttaaacaactaaacagtacgacggatgctgaagcgtgttatatatacaagtctggaaaactggttaaaacagtatgtaaaagtactcaatctgtactatgtgttaaaaaattctacaagtgacaacaaaaaatgaattaataataagtcgttaacgtacgccgccatggacgccgcgtttgttattactccaatgggtgtgttgactataacagatacattgtatgatgatctcgatatctcaatcatggactttataggaccatacattataggtaacataaaaactgtccaaatagatgtacgggatataaaatattccgacatgcaaaaatgctactttagctataagggtaaaatagttcctcaggattctaatgatttggctagattcaacatttatagcatttgtgccgcatacagatcaaaaaataccatcatcatagcatgcgactatgatatcatgttagatatagaagataaacatcagccattttatctattcccatctattgatgtttttaacgctacaatcatagaagcgtataacctgtatacagctggagattatcatctaatcatcaatccttcagataatctgaaaatgaaattgtcgtttaattcttcattctgcatatcagacggcaatggatggatcataattgatgggaaatgcaatagtaattttttatcataaaagttgtaaagtaaataataaaacaataaatattgaactagtagtacgtatattgagcaatcagaaatgatgctggtacctcttatcacggtgaccgtagttgcgggaacaatattagtatgttatatattatatatttgtaggaaaaagatacgtactgtctataatgacaataaaattatcatgacaaaattaaaaaagataaagagttctaattccagcaaatctagtaaatcaactgatagcgaatcagactgggaggatcactgtagtgctatggaacaaaacaatgacgtagataatatttctaggaatgagatattggacgatgatagcttcgctggtagtttaatatgggataacgaatccaatgttatggcgcctagcacagaacacatttacgatagtgttgctggaagcacgctgctaataaataatgatcgtaatgaacagactatttatcagaacactacagtagtacttaatgaagataccaaacagaatcctaactattcatccaatcctttcgtaaattataataaaaccagtatttgtagcaagtcaaatccgttcattacagaactcaacaataaatttagtgagaataatccgtttagacgagcacatagcgatgattatcttaataagcaagaacaagatcatgaacacgatgatatagaatcattggtgtgattagtttcctttttataaaattgaagtaatatttagtattattgctgccgtcacgttgtacaaatggagatattccctgtattcggcatttctaaaattagcaattttattgctaataatgactgtagatattatatagatacagaacatcaaaaaattatatctgatgagatcaatagacagatggatgaaacggtacttcttaccaacatcttaagcgtagaagttgtaaatgacaatgagatgtaccatcttattcctcatagattatcgacgattatactctgtattagttctgtcggaggatgtgttatctctatagataatgacgtcaatggcaaaaatattctaacctttcccattgatcatgctgtaatcatatccccactgagtaaatgtgtcgtagttagcaagggtcctacaaccatattggttgttaaagcggatatacctagcaaacgattggtaacatcgtttacaaacgacatactgtatgtaaacaatctatcactgattaattattcgccgttgtctgtattcattattagacgagttaccgactatttggatagacacatatgcgatcagatatttgcgaataataagtggtattccattataaccatcgacaataagcagtttcctattccatcaaactgtataggtatgtcctctgccaagtacataaattctagcatcgagcaagatactttaatacatgtttgtaacctcgagcatccattcgacttagtatacaaaaaaatgcagtcgtacaattctgtacctatcaaggaacaaatattgtacggtagaattgataatataaatatgagcattagtatttctgtggattaatagatttctagtatggggatcattaatcatctctaatctctaaatacctcataaaacgaaaaaaaagctattatcaaatactgtacggaatggattcattctcttctctttttatgaaactctgttgtatatctactgataaaactggaagcaaaaaatctgataaaaagaataagaataagatcaaggattattataaaataacaatagttcctggttcctcttccacgtctactagctcgtggtattatacacatgcctagtaatagtctctttgcgttgacggaaagcagactagaaataacaggctaaaatgttcagacaccataatagttcccaacccagataataacagagtaccatcaacacattcctttaaactcaatcccaaacccaaaaccgttaaaatgtatccggccaattgatagtagataatgaggtgtacagcgcatgatgatttacacagtaaccaaaatgaaaatactttagtaattataagaaatatagatggtaacgtcatcatcaacaatccaataatatgccggagagtaaacattgacggataaaacaaaaatgctccgcataactctatcatggcaataacacaaccaaatacttgtaagattcctaaattagtagaaaatacaacggatatcgatgtataagtgatctcgagaaataataagaataaagtaatgcccgtaaagataaacatcaacattgtttggtaatcattaaaccaattagtatgaagttgaactaatttcacagtagattttattccagtattatccccgcatgtataagtacctggtaagatatctttatattccataatcaatgagacatcactatctgataacgaatgaagtctagcactagtatgccatttacttaatattgtcgtcttggaagttttattataagttaaaatatcatggttatccaatttccatctaatatactttgtcggattatctatagtacacggaataatgatggtatcattacatgctgtatactctatggtctttgtagttgttataacaaccaacgtatagaggtatatcaacgatattctaactcttgacattttttatttatttaaaatgatacctttgttatttattttattctattttgctaacggtattgaatggcataagtttgaaacgagtgaagaaataatttctacttacttattagacgacgtattatacacgggtgttaatggggcggtatacacattttcaaataataaactaaacaaaactggtttaactaataataattatataacaacatctataaaagtagaggatgcggaaccaataacggaaatcccaaatgttggaaaatagacggttcagacgacccaaaacatagaggtagaggatacgctccttatcaaaatagcaaagtaacgataatcagtcacaacggatgtgtactatctgacataaacatatcaaaagaaggaattaaacgatggagaagatttgacggaccatgtggttatgatttatacacggcggataacgtaattccaaaagatggtttacgaggagcattcgtcgataaagatggtacttatgacaaagtttacattcttttcactgatactatcggctcaaagagaattgtcaaaattccgtatatagcacaaatgtgcctaaacgacgaaggtggtccatcatcattgtctagtcatagatggtcgacgtttctcaaagtcgaattagaatgtgatatcgacggaagaagttatagacaaattattcattctagaactataaaaacagataatgatacgatactatatgtattcttcgatagtccttattccaagtccgcattatgtacctattctatgaataccattaaacaatctttttctacgtcaaaattggaaggatatacaaagcaattgccgtctccagctcctggtatatgtttaccagctggaaaagttgttccacataccacgtttgaagtcatagaaaaatataatgtactagatgatattataaagcctttatctaaccaacctatcttcgaaggaccgtctggtgttaaatggttcgatataaaggagaaggaaaatgaacatcgggaatatagaatatacttcataaaagaaaattctatatattcgttcgatacaaaatctaaacaaactcgtagctcgcaagtcgatgcgcgactattttcagtaatggtaacttcgaaaccgttatttatagcagatatagggataggagtaggaatgccacaaatgaaaaaaatacttaaaatgtaatcttaatcgagtacaccgcacgacaatgaacaaacataagacagattatgctggttatgcttgctgcgtaatatgcggtctaattgttggaattatttttacagcgacactattaaaagttgtagaacgtaaattagttcatacaccatcaatagataaaacgataaaagatgcatatattagagaagattgtcctactgactggataagctataataataaatgtatccatttatctactgatcgaaaaacctgggaggaaggacgtaatgcatgcaaagctctaaatccaaattcggatctaattaagatagagactccaaacgagttaagttttttaagaagcattagacgcggatattgggtaggagaatccgaaatattaaaccagacaaccccatataattttatagctaaaaatgccacgaagaatggaactaaaaaacggaaatatatttgtagtacaacgaatactcccaaactacatttttatcataccactacttcggttagatgttttagaaaaaaataaatatcgccgtaccgttcttgtttttataaaaataacaattaacaattatcaaattttttctttaatattttacgtggttgaccattcttggtggtaaaataatctcttagtgttggaatggaatgctgtttaatgtttccgcactcatcgtatattttgacgtatgcagtcacatcgtttacgcaatagtcagactgtagttctatcatgcttcctacatcagaaggaggaacagttttaaagtctcttggttttaatctattgccattagttttcatgaaatcctttgttttatccacttcacattttaaataaatgtccactatacattcttctgttaattttactagatcgtcatgggtcatagaatttataggttccgtagtccatggatccaaactagcaaacttcgcgtatacggtatcgcgattagtgtatacaccaactgtatgaaaattaagaaaacagtttaataaatcaacagaaatatttaatcctccgtttgatacagatgcgccatatttatggatttcggattcacacgttgtttgtctgaggtgttcgtctagtgttgcttctacgtaaacttcgattcccatatattctttattgtcagaatcgcataccgatttatcatcatacactgtttgaaaactaaatggtatacacatcaaaataataaataataacgagtacattctgcaatattgttatcgtaattggaaaaatagtgttcgagtgagttggattatgtgagtattggattgtatattttattttatattttatattttgtagtaagaatagaatgctaatgtcaagtttattccaatagatgtcttattaaaaaacatatataataaataacaatggctgaatggcataaaattatcgaggatatctcaaaaaataataagttcgaggatgccgccatcgttgattacaagactacaaagaatgttctagctgctattcctaacagaacatttgccaagattaatcctctcatcactaatcgtaatattctaaaacctcttattggtcagaaatattgtattgtatatactaactctctaatggatgagaacacgtatgctatggagttgcttactgggtacgcccctgtatctccgatcgttatagcgagaactcataccgcacttatatttttgatgggtaagccaacaacatccagacgtgacgtgtatagaacgtgtagagatcacgctacccgtgtacgtgcaactggtaattaaaataaaaagtaatattcatatgtagtgtcaattttaaatgatgatgatgaaatggataatatccatattgacgatgtcaataatgccggtattggcatacagttcatcgatttttagatttcattcagaggatgtggaattatgttatgggcatttgtattttgataggatctataatgtagtaaatataaaatataatccgcatattccatatagatataattttattaatcgcacgttaaccgtagatgaactagacgataatgtcttttttacacatggttattttttaaaacacaaatatggttcacttaatcctagtttgattgtctcattatcaggaaacttaaaatataatgatatacaatgctcagtaaatgtatcgtgtctcattaaaaatttggcaacgagtacatctactatattaacatctaaacataagacttattctctacatcggtccacgtgtattactataataggatacgattctattatatggtataaagatataaatgacatctatgattttactgcaatatgtatgctaatagcgtctacattgatagtgaccatatacgtgtttaaaaaaataaaaatgaactcttaattatgctatgctattagaaatggataaaatcaaaattacggttgattcaaaaattggtaatgttgttaccatatcgtataacttggaaaagataactattgatgtcacacctaaaaagaaaaaagaaaaggatgtattattagcgcaatcagttgctgtcgaagaggcaaaagatgtcaaggtagaagaaaaaaatattatcgatattgaagatgacgatgatatggatgtagaaagcgcataatacgatctataaaaataagtatataaatactttttatttactgtactcttactgtgtagtggtgataccctactcgattatttttttaaaaaaaaatacttattctgattcttctagccatttccgtgttcgttcgaatgccacatcgacgttaaagataggggagtagttgaaatctagttctgcattgttggtacgcacctcaaatgtagtgttggatatcttcaacgtatagttgttgagtagtgatggttttctaaatagaattctcttcatatcattcttgcacgcgtacatttttagcatccatcttggaatcctagatccttgttctattcccaatggtttcatcaatagaagattaaacatatcgtacgaacacgatggagagtaatcgtagcaaaagtaagcatttcctttaatctcagatcccggatactggatatattttgcagccaacacgtgcatccatgcagcatttcctacatatacccggctatgtaccgcgttatcatcgactgtacgatacataatgttaccgtgttgcttacattgctcgtaaaagactttcatcaatttgtctccttctccgtaaattccagtgggtcttaggcaacaagtatacaattttgctccattcatgattacggaattattggctttcataaccagttgctcggccatacgtttactttttgcgtatacatgtcctggtgatatatcataaagggtatgctcatggccgatgaatggatcaccgtgtttattgggtcctattgcttccatgctactagtatagatcaaatacttgattcctaggtccacacaagctgccaatatagtctgtgttccataatagtttactttcatgatttcattatcggtgtattttccaaatacatccactagagcagctgtatgaataatcagatttaccccatctagcgcttctcttaccttatcaaagtcgtttatatcacattgtatatagtttataaccttaactttcgaggttattggttgtggatcttctacaatatctatgactctgatttcttgaacatcatctgcactaattaacagttttactatatacctgcctagaaatccggcaccaccagtaaccgcgtacacggccattgctgccactcataatatcagactacttattctattttactaaataatggctgtttgtataatagaccacgataatatcagaggagttatttactttgaaccagtccatggaaaagataaagttattggattaaaatccggaacgtatagtttgataattcatcgttacggagatattagtcaaggatgtgattccataggcagtccagaaatatttatcggtaacatctttgtaaacagatatggtgtagcatatgtttatttagatacagatgtaaatatatctacaattattggaaaggcgttatctatttcaaaaaatgatcagagattagcgtgtggagttattggtatttcttacataaatgaaaagataatacattttcttacaattaacgagaatggcgtttgatatatcagttaatgcgtctaaaacaataaatgcattagtttacttttctactcagcaaaataaattagtcatacgtaatgaagttaatgatacacactacactgtcgaatttgatagggacaaagtagttgacacgtttatttcatataatagacataatgactccatagagataagaggggtgcttccagaggaaactaatattggttgcgcggttaatacgccggttagtatgacttacttgtataataagtatagttttaaactgattttagcagaatatataagacacagaaatactatatccggcaatatttattcggcattgatgacactagatgatttggctattaaacagtatggagacattgatctattatttaatgagaaacttaaagtagactccgattcgggactatttgactttgtcaactttgtaaaggatatgatatgttgtgattctagaatagtagtagctctatctagtctagtatctaaacattgggaattgacaaataaaaaatataggtgtatggcattagccgaacatatatctgatagtattccaatatctgagctatctagactacgatacaatctatgtaagtatctacgcgggcacactgagagcatagaggatgaatttgattattttgaagacgatgattcgtctacatgttctgccgtaaccgacagggaaacggatgtataattttttttatagcgtgaaggatatgataaaaaatataattgttgtatttatcccattccaatcaccttatatgattctgtaacacaatgaaggagtcttatagatgtatagaggtcagatactggtttgataaactgtttattccacataagtatgtttgactttatggttagacccgcatactttaacaaatcactgaaaattggagttaggtattgacctctcagaatcagttgccgttctggaacattaaatgtattttttatgatatactccaacgcatttatgtgggcatacaacaagtcattactaatggagtattccaagagaagagatttcaacagactgtttatgaactcgaatgccgcctcattgtcgcttatattgatgatgtcgaattctcccaatatcatcaccgatgagtagctcatcttgttatcgggatccaagttttctaaagatgtcattaaaccctcgatcatgaatggatttatcatcatcgtttttatgttggacatgagcttagtccgtttgtccacatctatagacgacgatttctgaattatttcatatatccctctctttaactccaggaacttgtcaggatggtctactttaatatgttctcgtctaagagatgaaaatctttggatggttgcacgcgacttttctctaaaggatcctctcttaaatgaatccatcttatccttggacaagatggacagtctattttccttagatggtttaatatttttgttacccatgatctataaaggtagacctaatcgtctcggatgaccatatatttattttcagttttattatacgcataaattgtaaaaaatatgttaggtttacaaaaatgtctcgtggggcattaatcgtttttgaaggattggacaaatctggaaaaacaacacaatgtatgaacatcatggaatctataccggcaaacacgataaaatatcttaactttcctcagagatccactgtcactggaaagatgatagatgactatctaactcgtaaaaaaacctataatgatcatatagttaatctattattttgtgcaaatagatgggagtttgcatcttttatacaagaacaactagaacagggaattactttaatagttgatagatacgcattctctggagtagcgtatgccgccgctaaaggcgcgtcaatgactctcagtaagagttatgaatctggattgcctaaacccgacttagttatattcttggaatctggtagcaaagaaattaatagaaacgtcggcgaggaaatttatgaagatgttacattccaacaaaaggtattacaagaatataaaaaaatgattgaagaaggagatattcattggcaaattatttcttctgaattcgaggaagatgtaaagaaggagttgattaagaatatagttatagaggctatacacacggttactggaccagtggggcaactgtggatgtaatagtgaaattacattttttataaatggatgaagcatattactctggcaacttggaatcagtactcggatacgtgtccgatatgcataccgaactcgcatcaatatctcaattagttattgccaagatagaaactatagataatgatatattaaacaaggacattgtaaattttatcatgtgtagatcaaacttggataatccatttatctctttcctagatactgtatatactattatagatcaagagatctatcagaccgaattgattaattcattagacgacaatgaaattatcgattgtatagttaacaagtttatgagcttttataaggataacctagaaaatatagtagatgctatcattactctaaaatatataatgaataatccagattttaaaactacgtatgccgaagtactcggttccagaatagcggatatagatattaaacaagtgatacgtgagaatatactacaattgtctaataatatccgcgaacgatatttgtgaaaatattaaaaaaaaatactttttttattaaatgacgtcgcttcgcgaatttagaaaattatgctgtgatatatatcacgcatcaggatataaagaaaaatctaaattaattagagactttataacagatagggatgataaatatttgatcattaagctattgcttcccggattagacgatagaatttataacatgaacgataaacaaattataaaattatatagtataatatttaaacaatctcaggaagatatgctacaagatttaggatacggatatataggagacactattaggactttcttcaaagagaacacagaaatccgtccacgagataaaagcattttaactttagaagaagtggatagttttttaactacgttatcatccgtaactaaagaatcgcatcaaataaaattattgactgatatcgcatccgtttgtacatgtaatgatttaaaatgtgtagtcatgcttattgataaagatctaaaaattaaagcgggccctcggtacgtacttaacgctattagtcctcatgcctatgatgtgtttagaaaatctaataacttgaaagagataatagaaaatgcatctaaacaaaatctagactctatatctatttctgttatgactccaattaatcccatgttagcggaatcgtgtgattctgtcaataaggcgtttaaaaaatttccatcaggaatgtttgcggaagtcaaatacgatggtgaaagagtacaagttcataaaaataataacgagtttgccttctttagtagaaacatgaaaccagtactctctcataaagtggattatctcaaagaatacataccgaaagcatttaaaaaagctacgtctatcgtattggattctgaaattgttcttgtagacgaacataatgtaccgctcccgtttggaagtttaggtatacacaaaaagaaagaatataaaaactctaacatgtgtttgttcgtgtttgactgtttgtactttgatggattcgatatgacggacattccattgtacgaacgaagatcttttctcaaagatgttatggttgaaatacccaatagaatagtattctcagagttgacgaatattagtaacgagtctcagttaactgacgtattggatgatgcactaacgagaaaattagaaggattggtcttaaaagatattaatggagtatacgaaccgggaaagagaagatggttaaaaataaagcgagactatttgaacgagggttccatggcagattctgccgatttagtagtactaggtgcttactatggtaaaggagcaaagggtggtatcatggcagtctttctaatgggttgttacgacgatgaatccggtaaatggaagacggttaccaagtgttcaggacacgatgataatacgttaagggagttgcaagaccaattaaagatgattaaaattaacaaggatcccaaaaaaattccagagtggttagtagttaataaaatctatattcccgattttgtagtagaggatccaaaacaatctcagatatgggaaatttcaggagcagagtttacatcttccaagtcccataccgcaaatggaatatccattagatttcctagatttactaggataagagaggataaaacgtggaaagaatctactcatctaaacgatttagtaaacttgactaaatcttaatagttacatacaaattaaaataacactatttagttggtggtcgccatggatggtgttattgtatactgtctaaacgcgttagtaaaacatggcgaggaaataaatcatataaaaaatgatttcatgattaaaccatgttgtgaaaaagtcaagaacgttcacattggcggacaatctaaaaacaatacagtgattgcagatttgccatatatggataatgcggtatccgatgtatgcaattcactgtataaaaagaatgtatcaagaatatccagatttgctaatttgataaagatagatgacgatgacaagactcctactggtgtatataattattttaaacctaaagatgccattcctgttattatatccataggaaaggatagagatgtttgtgaactattaatctcatctgataaagcgtgtgcgtgtatagagttaaattcatataaagtagccattcttcccatggatgtttccttttttaccaaaggaaatgcatcattgattattctcctgtttgatttctctatcgatgcggcacctctcttaagaagtgtaaccgataataatgttattatatctagacaccagcgtctacatgacgagcttccgagttccaattggttcaagttttacataagtataaagtccgactattgttctatattatatatggttgttgatggatctgtgatgcatgcaatagctgataatagaacttacgcaaatattagcaaaaatatattagacaatactacaattaacgatgagtgtagatgctgttattttgaaccacagattaggattcttgatagagatgagatgctcaatggatcatcgtgtgatatgaacagacattgtattatgatgaatttacctgatgtaggcgaatttggatctagtatgttggggaaatatgaacctgacatgattaagattgctctttcggtggctggtatttggaaagttttataggtagttgatagaacaaaatacataattttgtaaaaataaatcactttttatactaatatgacacgattaccaatacttttgttactaatatcattagtatacgctacaccttttcctcagacatctaaaaaaataggtgatgatgcaactttatcatgtaatcgaaataatacaaatgactacgttgttatgagtgcttggtataaggagcccaattccattattcttttagctgctaaaagcgacgtcttgtattttgataattataccaaggataaaatatcttacgactctccatacgatgatctagttacaactatcacaattaaatcattgactgctagagatgccggtacttatgtatgtgcattctttatgacatcgcctacaaatgacactgataaagtagattatgaagaatactccacagagttgattgtaaatacagatagtgaatcgactatagacataatactatctggatctacacattcaccggaaactagttctgagaaacctgattatatagataattctaattgctcgtcggtattcgaaatcgcgactccggaaccaattactgataatgtagaagatcatacagacaccgtcacatacactagtgatagcattaatacagtaagtgcatcatctggagaatccacaacagacgagactccggaaccaattactgataaagaagaagatcatacagttacagacactgtctcatacactacagtaagtacatcatctggaattgtcactactaaatcaaccaccgatgatgcggatctttatgatacgtacaatgataatgatacagtaccatcaactactgtaggcggtagtacaacctctattagcaattataaaaccaaggactttgtagaaatatttggtattaccgcattaattatattgtcggccgtggcaatattctgtattacatattatatatataataaacgttcacgtaaatacaaaacagagaacaaagtctagatttttgacttacataaatgtctgggatagtaaaatctatcatattgagcgggccatctggtttaggaaagacagccatagccaaaagactatgggaatatatttggatttgtggtgtcccataccactagatttcctcgtcctatggaacgagaaggtgtcgattaccattacgttaacagagaggccatctggaagggaatagccgccggaacatactgagtttttaggaaatatttacggaacttctaaaactgctgtgaatacagcggctattaataatcgtatttgtgtgatggatctaaacatcgacggtgttagaagttttaaaaatacttacctaatgccttactcggtgtatataagacctacctctcttaaaatggttgagaccaagcttcgttgtagaaacactgaagcggatgatgagattcatcgtcgtgtgatgttggcaaaaactgacatggatgaggcaggtgaagccggtctattcgacactattatcattgaagatgatgtgaatttagcatatagtaagttaattcagatactacaggaccgtattagaatgtattttaacactaattagagacttaagacttaaaacttgataattaataatataactcgtttttatatgtggctatttcaacgtctaatgtattagttaaatattaaaacttaccacgtaaaacttaaaatttaaaatgatatttcattgacagatagatcacacattatgaactttcaaggacttgtgttaactgacaattgcaaaaatcaatgggtcgttggaccattaataggaaaaggtggatttggtagtatttatactactaatgacaataattatgtagtaaaaatagagcccaaagctaacggatcattatttaccgaacaggcattttatactagagtacttaaaccatccgttatcgaagaatggaaaaaatctcacaatataaagcacgtaggtcttatcacgtgcaaggcatttggtctatacaaatccattaatgtggaatatcgattcttggtaattaatagattaggtgcagatctagatgcggtgatcagagccaataataatagattaccaaaaaggtcggtgatgttgatcggaatcgaaatcttaaataccatacaatttatgcacgagcaaggatattctcacggagatattaaagcgagtaatatagtcttggatcaaatagataagaataaattatatctagtggattacggattggtttctaaattcatgtctaatggcgaacatgttccatttataagaaatccaaataaaatggataacggtactctagaatttacacctatagattcgcataaaggatacgttgtatctagacgtggagatctagaaacacttggatattgtatgattagatggttgggaggtatcttgccatggactaagatatctgaaacaaagaattgtgcattagtaagtgccacaaaacagaaatatgttaacaatactgcgactttgttaatgaccagtttgcaatatgcacctagagaattgctgcaatatattaccatggtaaactctttgacatattttgaggaacccaattacgacaagtttcggcacatattaatgcagggtgtatattattaagtgtggtgtttggttgatgtaaaatttttgtcgataaaaattaaaaaataacttaatttattattgatctcgtgtgtacaaccgaaatcatggcgatgttttacgcacacgctctcggtgggtacgacgagaatcttcatgcctttcctggaatatcatcgactgttgccaatgatgtcagtttataataacaagtatgacattgtaaaagacaaatatatgtggtgttacagtcaggtgaacaagagatatattggagcactgctgcctatgtttgagtgcaatgaatatctacaaattggagatccgatccatgatcaagaaggaaatcacatatcgccacaaaaactactatgctctaagcggaatcgggtacgagagtctagacttgtgtttggaaggagtagggattcatcatcacgtacttgaaacagaaaacgctgtatatggaaaagttcaacatgattattctactatcaaagagaaggccaaagaaatgaatgcactcagttcaggacctatcatcgattaccacgtctggataggagattgtatctgtcaagttactgctgtggacgtacatggaaaggaaattatgagaatgagattcaaaaagggtgcggtgcttccgatcccaaatctggtaaaagttaaacttggggagaatgatacagaaaatctttcttctactatatcggcggcaccatcgaggtaaccacctctctggaagacagtgtgaatcatgtactcatgaaacgtttggaatctatacgccatatgtggtctgttgtatatgatcattttgatattgtgaatggtaaagaatgctgttatgtgcatacgcatttgtctaatcaaaatcttataccgagtactgtaaaaacaaatttgtacatgaagactatgggatcatgcattcaaatgagtatcttagcgaactgaaggaatcaggtggatggagtcccagaccagaaatgcaggaatttgaatatccagatggagtggaagacactgaatcaattgagagattggtagaggagttcttcaatagatcagaacttcaggctggtaaatctattaatgttaaacatacatctgtttcagctaagcaactaagaacacgtatactctcatcttttgccaacacagagggtggatatttgttcattggagttgataataatacacacaaagtatttggattcacggtgggttacgactacctcagactgatagagaatgatatagaaaagcatatcaaaagactttgtgttgtgtatttctgtgagaagaaagaggacatcaagtacacgtgtcgattcatcaaggtatataaacctggggatgaggctacctcgacatacgtgtgcgctatcaaagtggaaagatgctgttgtgctgtgtttgcagattggccagaatcatggtatcaagaagtattctccagatgaataggtgtcacatataaaattttaattaatgtaactatagagaacaaataataggttgtaatatcatatagacaataactaacaattaattagtaactgttatctctttttaactaactaactatacctattaatacatcgtaattatagttcttaacatctattaatcattgattcgcttctttaattttttataaaccaacattgttaattgaaaagggataacatgttacagaatataaattatatatggattttttttaaaaaggaaatacttgactggagtgtatatttatctcttcattatatagcacgcgtgttttccaatttttccacatcccatataatacaggattataatctcgttcgaacatacgagaaagtggataaaacaatagttgattttttatctaggttgccaaatttattccatattttagaatatggggaaaatattctacatatttattctatggatgatgctaatacgaatattataattttttttctagatagagtattaaatattaataagaacgggtcatttatacacaatctcaggttatcatcatccattaatataaaagaatatgtatatcaattagttaataatgatcatccagataataggataagactaatgcttgaaaatggacgtagaacaagacattttttgtcctatatatcagatacagttaatatctatatatgtattttatatagatgccgaagacagttacggttgtacattattacatagatgtatatatcactataagaaatcagaatcagaatcagaatcatacaatgaattaattaagatattgttaaataatggatcagatgtagataaaaaagatacgtacggaaacacaccttttatcctattatgtaaacacgatatcaacaacgtggaattgtttgagatatgtttagagaatgctaatatagactctgtagactttaatagatatacacctcttcattatgtctcatgtcgtaataaatatgattttgtaaagttattaatttctaaaggagcaaatgttaatgcgcgtaataaattcggaactactccattttattgtggaattatacacggtatctcgcttataaaactatatttggaatcagacacagagttagaaatagataatgaacatatagttcgtcatttaataatttttgatgctgttgaatctttagattatctattatccagaggagttattgatattaactatcgtactatttacgacgctgtcagttataatgcgtataatacgttggtctatctattaaacagaaatggtgattttgagacgattactactagtggatgtacatgtatttcggaagcagtcgcaaacaacaacaaaataataatggaagtactattgtctaaacgaccatctttgaaaattatgatacagtctatgatagcaattactaaacataaacagcataatgcagatttattgaaaatgtgtataaaatatactgcgtgtatgaccgattatgatactcttatagatgtacaatcactacagcaatataaatggtatattttaagatgtttcgatgaaatagatatcatgaagagatgttatataaaaaataaaactgtattccaattagttttttgtatcaaagacattaatactttaatgagatacggtaaacatccttctttcgtgaagtgcactagtctcgacgtatacggaagtcgtgtacgtaatatcatagcatctattagatatcgtcagagattaattagtctattatccaagaagctggatcctggagataaatggtcgtgttttcctaacgaaataaaatataacgataacgaactgtccacatatctaaaaatcttataaacactattaaaatataaaatcacactacatcattgtttccttttagtgctcgacagtgtatactatttttaacgctcataaataaaaatgaaaacgatttccgttgttacgttgttatgcgtactacctgctgttgtttattcaacatgtactgtacccactatgaataacgctaaattaacgtctaccgaaacatcgtttaataataaccagaaagttacgtttacatgtgatcagggatatcattcttcggatccaaatgctgtctgcgaaacagataaatggaaatacgaaaatccatgcaaaaaaatgtgcacagtttctgattacatctctgaactatataataaaccgctatacgaagtgaattccaccatgacactaagttgcaacggcgaaacaaaatattttcgttgcgaagaaaaaaatggaaatacttcttggaatgatactgttacgtgtcctaatgcggaatgtcaacctcttcaattagaacacggatcgtgtcaaccagttaaagaaaaatactcatttggggaatatataactatcaactgtgatgttggatatgaggttattggtgcttcgtacataagttgtacagctaattcttggaatgttattccatcatgtcaacaaaaatgtgatataccgtctctatctaatggattaatttccggatctacattttctatcggtggcgttatacatcttagttgtaaaagtggttttatactaacgggatctccatcatccacatgtatcgacggtaaatggaatcccatactcccaacatgtgtacgatctaacgaaaaatttgatccagtggatgatggtcccgacgatgagacagatttgagcaaactctcgaaagacgttgtacaatatgaacaagaaatagaatcgttagaagcaacttatcatataatcatagtggcgttaacaattatgggcgtcatatttttaatctccgttatagtattagtttgttcctgtgacaaaaataatgaccaatataagttccataaattgctaccgtgaatataaatccgttaaaataatgaataattaataattaataatttaataacaaacaagtatcaaaagattaaagacttatagctagaatcaattgagatgtcttcttcagtggatgttgatatctacgatgccgttagagcatttttactcaggcactattataacaagagatttattgtgtatggaagaagtaacgccatattacataatatatacaggctatttacaagatgcgccgttataccgttcgatgatatagtacgtactatgccaaatgaatcacgtgttaaacaatgggtgatggatacacttaatggtataatgatgaatgaacgcgatgtttctgtaagcgttggcaccggaatactattcatggaaatgtttttcgattacaataaaaatagtatcaacaatcaactaatgtatgatataattaatagcgtatctataattctagctaatgagagatatagaagcgcttttaacgacgatggtatatacatccgtagaaatatgattaacaagttgtacggatacgcatctctaactactattggcacgatcgctggaggtgtttgttattatctgttgatgcatctagttagtttgtataaataattatttcaatatactagttaaaattttaagattttaaatgtataaaaaactaataacgtttttatttgtaataggtgcattagcatcctattcgaataatgagtacactccgtttaataaactgagtgtaaaactctatatagatggagtagataatatagaaaattcatatactgatgataataatgaattggtgttaaattttaaagagtacacaatttctattattacagagtcatgcgacgtcggatttgattccatagatatagatgttataaacgactataaaattattgatatgtctactattcaacgcagaggtcacacgtgtagaatatctaccaaattatcatgccattatgataagtacccttatattcacaaatatgatggtgatgagcgacaatattctattactgcagagggaaaatgctataaaggaataaaatatgaaataagtatgatcaacgatgatactctattgagaaaacatactcttaaaattggatctacttatatatttgatcgtcatggacatagtaatacatattattcaaaatatgatttttaaaaatttaaaatatattatcacttcagtgacagtagtcaaataacaaacaacaccatgagatatattataattctcgcagttttgttcattaatagtatacacgctaaaataactagttataagtttgaatccgtcaattttgattccaaaattgaatggactggggatggtctatacaatatatcccttaaaaattatggcatcaagacgtggcaaacaatgtatacaaatgtaccagaaggaacatacgacatatccgcatttccaaagaatgatttcgtatctttctgggttaaatttgaacaaggcgattataaagtggaagagtattgtacgggaccaccgactgtaacattaactgaatacgacgaccatccgtatgctactagaggtagcaaaaagattcctatttacaaacgcggtgacatgtgtgatatctacttgttgtatacggctaacttcacattcggagattctaaagaaccagtaccatatgatatcgatgactacgattgcacgtctacaggttgcagcatagactttgtcacaacagaaaaagtgtgcgtgacagcacagggagccacagaagggtttctcgaaaaaattactccatggagttcgaaagtatgtctgacacctaaaaagagtgtatatacatgcgcaattagatccaaagaagatgttcccaatttcaaggacaaaatggccagagttatcaagagaaaatttaactaaatttctcggtagcacatcaaatgatgttaccacttttcttagcatgcttaacttgactaaatattcataactaatttttattaatgatacaaaaacgaaataaaactgcatattatacactggttaacgcccttataggctctaaccattttcaagatgaggtccctgattatagtccttctgttcccctctatcatctactccatgtctattagacgatgtgagaagactgaagaggaaacatggggattgaaaatagggttgtgtataattgccaaagatttctatcccgaaagaactgattgcagtgttcatctcccaactgcaagtgaaggcaatggattcagggatatacgaaacaccgataaattataaaaaaagcaatgtgtccgctgtttccgttaataatactattttcgtaactggcggattattcataaataactctaatagcacgatcgtggttaacaatatggaaaaacttgacatttataaagacaaacaatggtcgattatagaaatgcctatggctagggtatatcacggcatcgactcgacatttggaatgttatattttgccggaggtctatccgttaccgaacaatatggtaatttagagaaaaacaacgagatatcttgttacaatcctagaacgaataagtggtttgatatttcatatactatttataagatatccatatcatcattgtgtaaactaaataacgtcttctatgtatttagtaaggacattggatatgtggaaaagtatgatggtctccccgctataaaggcattatcaacttctccttattgattgaaaatgaaaatataaatagtttttatgtatagcagtattaccctatagttttattgcttactactaacatggatacagatacagatgttacaaatgtagaagatatcatgaatgaaatagatagagagaaagaagaaatactaaaaaatgtagaaattgaaaataataaaaacattaacaagaatcatcccaatgaatatattagagaagcactcgttattaatacaagtagtaatagtgattccattgataaagaagttatagaatgtatcagtcacgatgtaggaatatagatcatatctactaatttttataatcaatacaaaacataaaaaacaactcgttattacatagcaggcatggaatccttcaagtattgttttgataacgatggcaagaaatggattatcggaaatactttatattctggtaattcaatactctataaggtcagaaaaaatttcactagttcgttctacaattacgtaatgaagatagatcacaaatcacacaagccattgttgtctgaaatacgattctatatatctgtattggatcctttgactatcgacaactggacacgggaacgtggtataaagtatttggctattccagatctgtatggaattggagaaaccgatgattatatgttcttcgttataaagaatttgggaagagtattcgccccaaaggatactgaatcagtcttcgaagcatgcgtcactatgataaacacgttagagtttatacactctcgaggatttacccatggaaaaatagaaccgaggaatatactgattagaaataaacgtctttcactaattgactattctagaactaacaaactatacaagagtggaaactcacatatagattacaacgaggacatgataacttcaggaaatatcaattatatgtgtgtagacaatcatcttggagcaacagtttcaaaacgaggagatttagaaatgttgggatattgcatgatagaatggttcggtggcaaacttccatggaaaaacgaaagtagtataaaagtaataaaacaaaaaaaagaatataaaaaatttatagctactttctttgaggactgttttcctgaaggaaatgaacctctggaattagttagatatatagaattagtatacacgttagattattctcaaactcctaattatgacagactacgtagactgtttatacaagattgaaatattctttttttatagagtgtggtagtgttacggatatctaatattaatattagactatctctatcgcgctacacgaccaatatcgattactatggatatcttctatgaaaggagagaatgtattcatttctccagcgtcaatctcgtcagtattgacaatactgtattatggagctaatggatccactgctgaacagctatcaaaatatgtagaaaaggaggagaacacggataaggttagcgctcagaatatctcattcaaatccatgaataaagtatatgggcgatattctgccgtgtttaaagattcctttttgagaaaaattggcgataagtttcaaactgttgacttcactgattgtcgcactatagatgcaatcaacaagtgtgtagatatctttactgaggggaaaatcaatccactattggatgaacaattgtctcctagcaattagtgccgtatactttaaagcaaaatggttgacgccattcgaaaaggaatttaccagtgattatcccttttacgtatcaccaacggaaatggtagacgtaagtatgatgtctatgtacggcgagctatttaatcacgcatctgtaaaagaatcattcggtaacttttcaatcatagaactgccatatgttggagatactagtatgatggtcattcttccagacaagattgatggattagaatccatagaacaaaatctaacagatacaaattttaagaaatggtgtaactctctggaagctacgtttatcgatgttcacattcccaagtttaaggtaacaggctcgtataatctggtggatactctagtaaagtcaggactgacagaggtgttcggttcaactggagattatagcaatatgtgtaatttagatgtgagtgtcgacgctatgatccacaaaacgtatatagatgtcaatgaagagtatacagaagcagctgcagcaacttgtgcactggtgtcagactgtgcatcaacaattacaaatgagttctgtgtagatcatccgttcatctatgtgattaggcatgttgatggaaaaatttttttcgttggtagatattgctctccgacaactaattgttaaccattttttttaaaaaaatagaaaaaacatgtggtattagtgcaggtcgttattcttccaattgcaattggtaagatgacggccaactttagtacccacgtcttttcaccacagcactgtggatgtgacagactgaccagtattgatgacgtcaaacaatgtttgactgaatatatttattggtcgtcctatgcataccgcaacaggcaatgcgctggacaattgtattccacactcctctcttttagagatgatgcggaattagtgttcatcgacattcgcgagctggtaaaaaatatgccgtgggatgatgtcaaagattgtgtagaaatcatccgttgttatataccggatgagcaaaaaaccatcatcggactttgtgcatatgctgctacttactggggaggtgaagaccatcccactagtaacagtctgaacgcattgtttgtgatgcttgagatgctaaattacgtggattataacatcatattccggcgtatgaattgatgagttgtacatcttgacattttcttctttcttctcttctccctttcccagaaacaaactttttttacccactataaaataaaatgagtatactacctgttatatttctttctatatttttttattcttcattcgttcagacttttaacgcgcctgaatgtatcgacaaagggcaatattttgcatcattcatggagttagaaaacgagccagtaatcttaccatgtcctcaaataaatacgctatcatccggatataatatattagatattttatgggaaaaacgaggagcggataatgatagaattataccgatagataatggtagcaatatgctaattctgaacccgacacaatcagactctggtatttatatatgcattaccacgaacgaaacctactgtgacatgatgtcgttaaatttgacaatcgtgtctgtctcagaatcaaatatagatcttatctcgtatccacaaatagtaaatgagagatctactggcgaaatggtatgtcccaatattaatgcatttattgctagtaacgtaaacgcagatattatatggagcgggcatcgacgccttagaaataagagacttaaacaacggacacctggaattattaccatagaagatgttagaaaaaatgatgctggttattatacatgtgttttagaatatatatacggtggcaaaacatataacgtaaccagaattgtaaaattagaggtacgggataaaataataccttctactatgcaattaccagaaggtgttgtaacttcaataggtagtaatttgactattgcgtgtagagtatcgttgagacctcccacaacggatgcagacgtcttttggataagtaatggtatgtattacgaagaagatgatggggacggagacggtagaataagtgtagcaaataaaatctatatgaccgataagagacgtgttattacatcccggttaaacattaatcctgtcaaggaagaagatgctacaacgtttacgtgtatggcgtttactattcctagcatcagcaaaacagttactgttagtataacgtgaatgtatgttgttacatttccatgtcaattgagtttataagaatttttatacattatcttccaacaaacaattgacgaacgtattgctatgattaactcccacgatactatgcatattattaatcattaacttgcagactatacctagtgctattttgacatactcatgttcttgtgtaattgcggtatctatattattaaagtacgtaaatctagctatagttttattatttaattttagataatataccgtctccttatttttaaaaattgccacatcctttattaaatcatgaatgggaatttctatgtcatcgttaatatattgtgaacaacaagagcagatatctataggaaagggtggaatgcgatacattgatctatgtagttttaaaacacacgcgaactttgaagaatttatataaatcattccatcgatacatccttctatgttgacatgtatatatccaggaattcttttattaatgtcaggaaatgtataaactaaaacattgcccgaaagcggtgcctctatctgcgttatatccgttcttaacttacaaaatgtaaccaatacctttgcatgacttgttttgttcggcaacgttagtttaaacttgacgaatggattaattacaatagcatgatccgcgcatctattaagtttttttactttaacgcccttgtatgtttttacagagactttatctaaatttctagtgcttgtatgtgttataaatataacgggatatagaactgaatcacctaccttagatacccaattacattttatcagatccagataataaacaaattttgtcgccctaactaattctatattgttatatattttacaattggttatgatatcatgtaataacttggagtctaacgcgcatcgtcgtacgtttatacaattgtgatttagtgtagtatatctacacatgtatttttccgcactatagtattctggactagtgataaaactatcgttatatctgtcttcaatgaactcatcgagatattgctctctgtcatattcatacacctgcataaactttctagacatcttacaatccgtgttattttaggatcatatttacatatttacgggtatatcaaagatgttagattagttaatgggaatcgtctataataatgaatattaaacaattatatgaggacttttaccacaaagcatcataaaaatgagtcgtcgtctgatttatgttttaaatatcaaccgcgaatcaactcataaaatacaagagaatgaaatatatacatattttagtcattgcaatatagaccatacttctacagaacttgattttgtagttaaaaactatgatctaaacagacgacaacctgtaactgggtatactgcactacactgctatttgtataataattactttacaaacgatgtactgaagatattattaaatcatggagtggatgtaacgatgaaaaccagtagcggacgtatgcctgtttatatattgcttactagatgttgtaatatttcacatgatgtagtgatagatatgatagacaaagataaaaaccacttatcgcatagagactattccaacctactactagagtatataaaatctcgttacatgttattgaaggaagaggatatcgatgagaacatagtatccactttattagataagggaatcgatcctaactttaaacaagacggatatacagcgttacattattattatttgtgtctcgcacacgtttataaaccaggtgagtgtagaaaaccgataacgataaaaaaggccaagcgaattatttctttgtttatacaacatggagctaatctaaacgcgttagataattgtggtaatacaccattccatttgtatcttagtattgaaatgtgtaataatattcatatgactaaaatgctgttgacttttaatccgaatttcaaaatatgtaataatcatggattaacgcctatactatgttatataacttccgactacatacaacacgatattcttgttatgttaatacatcactatgaaacaaatgttggagaaatgccgatagatgagcgtcgtataatcgtattcgagtttatcaaaacatattctacacgtccggcagattcgataacttatttgatgaataggtttaaaaatatagatatttatacccgctatgaaggaaagacattattacacgtagcatgtgaatataataatacacacgtaatagattatcttatacgtatcaacggagatataaatgcgttaaccgacaataacaaacacgctacacaactcattatagataacaaagaaaattccccatataccattaattgtttactgtatatacttagatatattgtagataagaatgtgataagatcgttggtggatcaacttccatctctacctatcttcgatataaaatcatttgagaaattcatatcctactgtatacttttagatgacacattttacaatagacacgttaggaatcgcaattctaaaacgtatcgatacgcattttcaaaatacatgtcgtttgataaatacgatggtataataactaaatgtcataaagaaacaatattgctcaaactatccactgttctagacactacactatatgcagttttaagatgccataattcgaaaaagttaagaagatacctcaacgagttaaaaaaatataataacgataagtcctttaaaatatattctaatattatgaatgagagataccttaatgtatattataaagatatgtacgtgtcaaaggtatatgataaactatttcctgttttcacagataaaaattgtctactaacattactaccttcagaaattatatacgaaatattatacatgctgacaattaacgatctttataatatatcgtatccacctaccaaagtatagttgtatttttctcatgcgatgtgtgtaaaaaaactgatattatataaatattttagtgccgtataatgaagatgacgatgaaaatgatggtacatatatatttcgtatcattattgttattgctattccacagttacgccatagacatcgaaaatgaaatcacagaattcttcaataaaatgagagatactctaccagctaaagactctaaatggttgaatccagcatgtatgttcggaggcacaatgaatgatatagccgctctaggagagccattcagcgcaaagtgtcctcctattgaagacagtcttttatcgcacagatataaagactatgtggttaaatgggagaggctagaaaaaaatagacggcgacaggtttctaataaacgtgttaaacatggtgatttatggatagccaactatacatctaaattcagtaaccgtaggtatttgtgtaccgtaactacaaagaatggtgactgtgttcagggtatagttagatctcatattaaaaaacctccttcatgcattccaaaaacatatgaactaggtactcatgataagtatggcatagacttatactgtggaattctttacgcaaaacattataataatataacttggtataaagataataaggaaattaatatcgacgatattaagtattcacaaacgggaaagaaattaattattcataatccagagttagaagatagtggaagatacaactgttacgttcattacgacgacgttagaatcaagatgtaaaatacttacggttataccgtcgcaagaccacaggtttaaactaatactagatccaaaaatcaacgtaacgataggagaacctgccaatataacatgcactgctgtgtcaacgtcattattgattgacgatgtactgattgaatgggaaaatccatccggatggcttataggattcgattttgatgtatactctgttttaactagtagaggcggtatcaccgaggcgaccttgtactttgaaaatgttactgaagaatatataggtaatacatataaatgtcgtggacacaactattattttgaaaaaacccttacaactacagtagtattggagtaaatacacaatgcatttttatatacattactgaataattattattattatttatatcgtatttgtgctataacgcgactatctaggtatttgtatctcaccgatagagaacatataaatgtagactctattaaacagttgtgtaaaatatcagatcctaatagatgtggatgtacggctttagaaatgagttcattaaaatatgtgatatcaacggaacatatttatataattatactattgctgttagtataattattgattccacggaagaactaccaacagttactccaattacaacaacatataattatactatcgatgatagcactactgaagaactacaagtgactcctcatatggatctccatcgatgatacatgtattaaaatactttccgaataagtcttttaaatattgtattaattatgaaaaactatgctatgcgagtatgatacgatactagattttatctctagcgagagatgtcgttagaatcatttatcaacgaatatcgataacatgtgtcatttatacgttaaagtctgtccgtcttctctattgtttagactgtttgtagaatgctgtgatataaacaaactagtagacacaaatatttaactcatgatgaagttgagaatgatatgctttagctaatataaaaatatattaatccactatatattctagacttgatttaaaaccgataaactactactacgtactgtataagttaggagcagaccctaattatgtagatgatagaggtaatacttctgcatctatatgtccacttatgagaaaacgtcatttaataagatgcatcgtgaaaagaaatttattaaagagttggtaaaatatgaaaccgaaagtaaataatataggaaatacacctctacataactacgtatctcaatatgatatcactctcattcctcatccacaacccattaaaaaatggaaattaaagccctctattagcataaacggctacaggtctacctttacaatggcctttccttgtgcccagttcagaccctgtcattgccacgctactaaggactccctgaataccgtggccgacgtcagacattgtctgactgaatacatcctgtgggtttctcatagatggacccatagagaaagcgcagggtctctctacaggcttctcatctctttcagaactgatgcaacggagctctttggtggtgagttgaaggattcacttccgtggagatcattaaatgactccatgaaaaccgccgaagaacttcgtgcaatcattggactttgtactcaatcagctatcgtctctggaagagtcttcaacgataagtatatcgacatactacttatgctgcgaaagattctgaacgagaacgactatctcaccctcttggatcatatccgcactgctaaatactaaatctccttcatgctctctcactacactttttatcatcttatgaggaataattagcaccagaatagctatggattgcacatgtattctatgtcgtctactggatgaagatgtgacgtacaaaaaaataaaactagaaattgaaacgtgtcacaacttatcaaaacatatagatagacgaggaaacaatgcgctacattgttacgtctccaataaatgcgatacagacattaagattgttcgactgttactctctcgcggagtcgagagactttgtagaaacaacgaaggattaactccgctaggagcatacagtaagcatagatacgtaaaatctcagattgtgcatctactgatatccagctattcgaattcctctaacgaactcaagtcgaatataaatgatttcgacttacgtctgctaaaatacctaattgtggataaacggatacgtccgtccaagaatacgaattatgcaatcaatggtctcggattggtggatatatacgtaacgacgcctaatccgagaccagaagtattgctatggcttcttaaatcagaatgttacagcaccggttacgtatttcgtacctgtatgtacaacagtgatatgtgtaagaactctcttcattactatatatcgtctcatagagaatctctatccaaggatgtaattaaatgtttgatcgataacaatgtttccatccaatactactggtcttgctcaaccatagatatagagattattaataaaggatgtggacacgtgtagagtatacgacgtcagccctatattagaggcgtattatctaaacaagcgatttagagtaaccccatataatgtagacatggaaatcgttaatcttcttattgagagacgtcatactcttgtcgacgtaatgcgtagtattacttcgtacgattccagagaatataaccactacatcatcgataacattctaaagagatttagacaacaggatgaatccatcgtacaagccatactgataaactacttacattacggcgatatggtaagtatacctatcattcaatgcatgttggataagacgacggacaacaactttgttaataataatctcgtcgatgtaaacgtcgtaaggtttatcgtggaaaatatggacacgcggctgtaaatcacatatctaacaatggccgtctatgtatgtacggtctgatattatcgagatttaataattgcgggtatcactgttatgaagatgtatttgatatactaagcaagtacatggatgatatagatatgatcgataactctactatattacgcggtcgatgtcaataatatacaatttgcaaagcggttattggaatatggagcgagtgtcacgctcgataatcaatacggccatccagaaaagcagttaccaaagagaagctagttgatttattactgagttaccatcccactctagagactatgattgacgcatttaatagagatatacgctatctatatcctgaaccattattcgcctgtatcagatacgccttaatcctagatgatgattttccttctaaagtaagtatgatatcgccggtcgtcataaggaactaaagcgctatagagcagacattaatagaatgaagaatgcctacatatcaggcgtctccatgtttgatatattatttaaacgaagcaaacgccacagattgagatacgcaaagaacaatgagaggatcgactccattaaataatttatcatggagtgataatgtcctgtttccatggcatattacaaaatcgattccgtccaagatgataaaaacatttaccggcatcataaacacggagtttattttatatgtctcgcataaacattactaaaaaaatatattgttcggttttctttcacatctttaattatgaaaaagtaaatcattatgagatggacgcatcgttcgcgacagtatgtggtacatacctaacgtatttatggacgacggtaagaatgaaggtcacgtttctgtcaacaatgtcgacgcgatcgtgtaacacgactcacaatagaatctgtgaatgctctcccgatcatggatgcaaggcatgtgtttcccaaacaaaatgtggaataggatacggagtatccggagacgtcatctgttctccgtgtggtctcggaacatattctcacaccgtctcttccgcagataaatgcgaacccgtacccagaaatacctttaactatatcgatgtggaaattaacctgtatccagttaacgacacatcgtgtactcggacgaccactaccggtctcagcgaatccatctcaacgtcggaactaactattactatgaatcataaagactgcgatcccgtcttcttaataaggtagcgacttcaggtttctttacaggagaaaggtgtgcactctgaatttcgagattaaatgcaataacaaagattcttcctccaaacagttaacgaaagcaaagaatgatactatcatgccgcattcggagacagtaactctagcgtcgacatctatatactatatagtaataccaatactcaagactacgaaactgatacaatctcttatcatgtgggtaatgtagccatatgcccggtagttgcgatatacataaactgatcactaattccaaacccacccgctttttatagtaagtttttcacccataaatacaataattaatttctcgtaaaagtagaaaatatattctaatttattgcacggtaaggaagtagaatcataaagaacagtactcaatcaatagcaatcatgaaacaatatatcgtactggcatgcatgtgcctgccagtcttcagcaatcatcctcatcgtgtacggaagaagaaaacaaacatcatatgggaatcgatgttattatcaaagtcacaaagcaagaccaaacaccgaccgatgataagatttgccaatccgtaacggaaattacagagtccgagtcagatccagatcccgaggtggaatcagtcgaggatgtagatcctcctaccacttattactccatcatcggtggaggtctgagaatgaactttggattcaccaaatgtcctcagattaaatccatctcagaatccgctgatggaaagactgtgaggtgtctatcgacatcagatgtagcgaagaagagaaagacagcgacatcaagacccatccagtactcgggtctaacatctctcataagaaagtgagttacgaagatatcatcggttcaacgatcgtcgatacaaaatgtgtcaagaatctagagtttagcgttcgtatcggagacatgtgcaaggaatcatctgaacttgaggtcaagtatgtcgacggatcggcatctgaaggtgcaaccgatgatacttcactcatcgattcaacaaaactcaaagcgtgtgtctgaatcgataactctattcatctgaaattggatgagtagggttaatcgaacgattcaggcacaccacgaattaaaaaagtgtaccggacactatattccggtttgcaaaacaaaaagttacctctcgcgacttcttctttttctgtctcaatagtgtgatacgattatgacactattcctatttcctttcagggtatcacaaaaatattaaacctctttctgatggtctcatacaaaaatatttttattctctttctctctttgatggtctcataaaaaatatttttattctctttctctctttgatggtctcataaaatatttttattctctttctctctttgatggtctcataaaaaatatttttattctctttctctctttgatggtctcataaaatatttttattctctttctctctttgatggtctcataaaaaatatttttattctctttctctctttgatggtctcataaaaaatattaaacctctttctgatggtgtcactaaaatatttttattctctttctctcttcaatggagtcataaaatatttttattctctttctctcttcgatggtctcacaaaaatattaaacctctttctgatggtgtcactaaaatatttttattctctttctctcttcaatggagtcataaaatatttttattctctttctctctttgatggtctcacaaaaatatttttattctctttctctctttgatggtctcacaaaaatatttttattctctttctctctttgatggtctcacaaaaatatttttattctctttctctctttgatggtctcataaaaaaagttttacaaaaatatttttattctctttctctctttgatggtctcataaaaaaagttttacaaaaatatttttattctctttctctctttgatggtctcataaaaaaagttttacaaaaatatttttattctctttctctctttgatggtctcataaaaaatattaaacctctttctgatggtgtcactaaaatatttttattctcattctctcttcaatggagtcataaaatatttttattctctttctctcttcgatggtctcacaaaaatattaaacctctttctgatggtgtcactaaaatatttttattctcattctctcttcaatggagtcataaaatatttttattctctttctctcttcgatggtctcacaaaaatattaaacctctttctgatggtgtcactaaaatatttttattctcattctctcttcaatggagtcataaaatatttttattctctttctctctttgatggtctcataaaaaaagttttacaaaaatatttttattctctttctctctttgatggtctcataaaaaatattaaacctctttctgatggtgtcactaaaatatttttattctctttctctcttcaatggagtcataaaatatttttattctctttctctcttcgatggtctcacaaaaatattaaacctctttctgatggtgtcactaaaatatttttattctcattctctcttcaatggagtcataaaatatttttattctctttctctctttgatggtctcataaaaaaagttttacaaaaatatttttattctctttctctctttgatggtctcataaaaaaagttttacaaaaatatttttattctctttctctctttgatggtctcataaaaaaagttttacaaaaatatttttattctctttctctctttgatggtctcataaaaaaagttttacaaaaatatttttattctctttctctctttgatggtctcataaaaaatattaaacctctttctgatggtgtcactaaaatatttttattctcattctctcttcaatggagtcataaaatatttttattctctttctctcttcgatggtctcacaaaaatattaaacctctttctgatggtgtcactaaaatatttttattctcattctctcttcaatggagtcataaaatatttttattctctttctctctttgatggtctcataaaaaaagttttacaaaaatatttttattctctttctctctttgatggtctcataaaaaaagttttacaaaaatatttttattctctttctctctttgatggtctcataaaaaaagttttacaaaaatatttttattctctttctctctttgatggtctcataaaaaaagttttacaaaaatatttttattctctttctctctttgatggtctcacaaaaatattaaacctctttctgatggagtcgtaaaaaagttttatctctttctccttcgatggtctcacaaaaatattaaacctctttctgatggagtcgtaaaaaagttttatctctttctctcttcgatggtctcacaaaaatattaaacctctttctgatggagtcgtaaaaaagttttatctctttctctcttcgatggtctcactaaaatattttttattctctttctgatgcatcaactatttcttaaacaataacgtccaacaacatatactcgtcgagcttatcaacatcccctatgcccatctaggttaccagacaattgtatatcataaaataatgtttataatttttacaaaaatatttttattctctttctctctttgatggtctcataaaaaaagttttacaaaaatatttttattctctttctctctttgatggtctcataaaaaatattaaacctctttctgatggtgtcactaaaatatttttattctcattctctcttcaatggagtcataaaatatttttattctctttctctcttcgatggtctcacaaaaatattaaacctctttctgatggtgtcactaaaatatttttattctcattctctcttcaatggagtcataaaatatttttattctctttctctctttgatggtctcataaaaaaagttttacaaaaatatttttattctctttctctctttgatggtctcataaaaaaagttttacaaaaatatttttattctctttctctctttgatggtctcataaaaaaagttttacaaaaatatttttattctctttctctctttgatggtctcataaaaaaagttttacaaaaatatttttattctctttctctctttgatggtctcataaaaaaagttttacaaaaatatttttattctctttctctctttgatggtctcataaaaaaagttttacaaaaatatttttattctctttctctctttgatggtctcataaaaaaagttttacaaaaatatttttattctctttctctctttgatggtctcataaaaaatattaaacctctttctgatggtgtcactaaaatatttttattctctttctctcttcaatggagtcataaaatatttttattctctttctctcttcgatggtctcacaaaaatattaaacctctttctgatggtgtcactaaaatatttttattctcattctctcttcaatggagtcataaaatatttttattctctttctctctttgatggtctcataaaaaaagttttacaaaaatatttttattctctttctctctttgatggtctcataaaaaaagttttacaaaaatatttttattctctttctctctttgatggtctcataaaaaaagttttacaaaaatatttttattctctttctctctttgatggtctcataaaaaaagttttacaaaaatatttttattctctttctctctttgatggtctcataaaaaaagttttacaaaaatatttttattctctttctctctttgatggtctcataaaaaatattaaacctctttctgatggtgtcactaaaatatttttattctctttctctcttcaatggagtcataaaatatttttattctctttctctcttcgatggtctcacaaaaatattaaacctctttctgatggtgtcactaaaatatttttattctctttctctcttcaatggagtcataaaatatttttattctctttctctctttgatggtctcataaaaaaagttttacaaaaatatttttattctctttctctctttgatggtctcataaaaaaagttttacaaaaatatttttattctctttctctctttgatggtctcataaaaaaagttttacaaaaatatttttattctctttctctctttgatggtctcataaaaaaagttttacaaaaatatttttattctctttctctctttgatggtctcataaaaaaagttttacaaaaatatttttattctctttctctctttgatggtctcataaaaaaagttttacaaaaatatttttattctctttctctctttgatggtctcataaaaaaagttttacaaaaatatttttattctctttctctctttgatggtctcataaaaaatattaaacctctttctgatggtgtcactaaaatatttttattctcattttctctttctctcttcaatggagtcataaaatatttttattctctttctctctttgatggtctcataaaaaatattaaacctctttctgatggtgtcactaaaatatttttattctcattctctcttcaatggagtcataaaaaagttttatctctttctctcttcgatggtctcacaaaaatattaaacctctttctgatggagtcgtaaaaaagttttatctctttctctcttcgatggtctcacaaaaatattaaacctctttctgatgcatcaactatttcttaaacaataacgtccaacaacatatactcatcccctatgcccatctaggttaccagacaattgtatatcataaaataatgtttataatttacacgttaaaatcatataataaaacgtagatcgtataatattttttggtatataaatgatctagtaaaatccatgtaggggatactgctcacattttttctttggtacaaaatttcacacaagtttttatacagacaaattcttgtccatatattttaaaacattgacttttgtactaagaaaaatatctagactaactatctctttctctttctctcttcgatggtctttctgatggagtcgtaaaaaagttttatctctttctctcttcgatggtctcacaaaaatattaaacctctttctgatggagtcgtaaaaaagttttatctctttctctcttcgatggtctcacaaaaatattaaacctctttctgatggagtcgtaaaaaagttttatctctttctccttcgatggtctcacaaaaatattaaacctctttctgatggagtcgtaaaaaagttttatctctttctctcttcgatggtctcacaaaaatattaaacctctttctgatggtgtcactaaaatatttttattctctttctctcttcgatggtctcacaaaaatattaaacctctttctgatggagtcgtaaaaaagttttatctctttctccttcgatggtctcacaaaaatattaaacctctttctgatggagtcgtaaaaaagttttatctctttctctcttcgatggtctcacaaaaatattaaacctctttctgatggagtcgtaaaaaagttttatctctttctccttcgatggtctcacaaaaatattaaacctctttctgatggagtcgtaaaaaagttttatctctttctccttcgatggtctcacaaaaatattaaacctctttctgatggagtcgtaaaaaagttttatctctttctccttcgatggtctcacaaaaatattaaacctctttctgatggagtcgtaaaaaagttttatctctttctctcttcgatggtctcacaaaaatattaaacctctttctgatggagtcgtaaaaaagttttatctctttctctcttcgatggtctcacaaaaatattaaacctctttctgatggagtcgtaaaaaagttttatctctttctccttcgatggtctcacaaaaatattaaacctctttctgatagtctctataaagcgattgatttttcttaccctctagagtttcctacggtcgttggtcacacatttttttctagacactaaataaatagtaagattaaattaattataaaattatgtatataatattaattataaaattatgtatatgatttactaactttagttagataaattaataatacataaattttagtatattaatattataaattaataatacataaattttagtatattaatattatattttaaatatttatttagtgtctagaaaaaaaggccggcctagcaggcc

SEQ ID NO: 16 - DNA, 66679 bp, Artificial Sequence
  sVAC fragment 1
tttttttctagacactaaataaaatatttaaaatataatattaatgtactaaaacttatatattattaatttatctaactaaagttagtaaattatatatataattttataattaatttaattttactaattttatttagtgtctagaaaaaaatgtgtgacccatgactgtaggaaactctagagtgtaagaaagatcgatcgctttatagagaccatcagaaagaggtttaatatttttgtgagaccatcgaagagagaaagagataaaacttttttacgactccatcagaaagaggtttaatatttttgtgagaccatcgaagagagaaagagataaaacttttttacgactccatcagaaagaggtttaatatttttgtgagaccatcgaaggagaaagagataaaacttttttacgactccatcagaaagaggtttaatatttttgtgagaccatcgaaggagaaagagataaaacttttttacgactccatcagaaagaggtttaatatttttgtgagaccatcgaagagagaaagagataaaacttttttacgactccatcagaaagaggtttaatatttttgtgagaccatcgaagagagaaagagataaaacttttttacgactccatcagaaagaggtttaatatttttgtgagaccatcgaaggagaaagagataaaacttttttacgactccatcagaaagaggtttaatatttttgtgagaccatcgaagagagaaagagataaaacttttttacgactccatcagaaagaggtttaatatttttgtgagaccatcgaagagagaaagagataaaacttttttacgactccatcagaaagaggtttaatatttttgtgagaccatcgaagagagaaagagataaaacttttttacgactccatcagaaagaggtttaatatttttgtgagaccatcgaagagagaaagagataaaacttttttacgactccatcagaaagaggtttaatatttttgtgagaccatcgaagagagaaagagataaaacttttttacgactccatcagaaagaggtttaatatttttgtgagaccatcgaagagagaaagagaaagagatagttgatctagatatttttcttagtacaaaagtcaatgttttaaaatatatggacaagaatttgtctgtataaaaacttgtgtgaaattttgtaccaaagaaaaaatgtgagcagtatcccctacatggattttactagatcatttatataccaaaaaatattatacgatctacgttttattatatgattttaacgtgtaaattataaacattattttatgatatacaattgtctggtaacctagatgggcataggggatgttgataagctcgacgagtatatgttgttggacgttattgtttaagaaatagttgatgcatcagaaagagaataaaaaatattttagtgagaccatcgaagagagaaagagataaaacttttttacgactccatcagaaagaggtttaatatttttgtgagaccatcgaagagagaaagagataaaacttttttacgactccatcagaaagaggtttaatatttttgtgagaccatcgaagagagaaagagataaaacttttttacgactccatcagaaagaggtttaatatttttgtgagaccatcgaagagagaaagagataaaacttttttacgactccatcagaaagaggtttaatatttttgtgagaccatcgaagagagaaagagataaaacttttttacgactccatcagaaagaggtttaatatttttgtgagaccatcgaagagagaaagagataaaacttttttacgactccatcagaaagaggtttaatatttttgtgagaccatcgaagagagaaagagataaaacttttttacgactccatcagaaagaggtttaatatttttgtgagaccatcgaagagagaaagagataaaacttttttacgactccatcagaaagaggtttaatatttttgtgagaccatcgaagagagaaagagataaaacttttttacgactccatcagaaagaggtttaatatttttgtgagaccatcgaagagagaaagagataaaacttttttacgactccatcagaaagaggtttaatatttttgtgagaccatcgaagagagaaagagataaaacttttttacgactccatcagaaagaggtttaatatttttgtgagaccatcgaagagagaaagagataaaacttttttacgactccatcagaaagaggtttaatatttttgtgagaccatcgaagagagaaagagataaaacttttttacgactccatcagaaagaggtttaatatttttgtgagaccatcgaagagagaaagagataaaacttttttacgactccatcagaaagaggtttaatatttttgtgagaccatcgaagagagaaagagataaaacttttttacgactccatcagaaagaggtttaatatttttgtgagaccatcgaagagagaaagagataaaacttttttacgactccatcagaaagaggtttaatatttttgtgagaccatcgaagagagaaagagataaaacttttttacgactccatcagaaagaggtttaatatttttgtgagaccatcgaagagagaaagagataaaacttttttacgactccatcagaaagaggtttaatatttttgtgagaccatcgaagagagaaagagaataaaaatattttatgactccattgaagagagaaagagaaaatgagaatgagaataaaaatattttagtgacaccatcagaaagaggtttaatatttttgtgagaccatcgaagagagaaagagaataaaaatattttatgactccattgaagagagaaagagaaaatgagaatgagaataaaaatattttagtgacaccatcagaaagaggtttaatattttttatgagaccatcaaagagagaaagagaataaaaatatttttgtaaaactttttttatgagaccatcaaagagagaaagagaataaaaatatttttgtaaaactttttttatgagaccatcaaagagagaaagagaataaaaatatttttgtaaaactttttttatgagaccatcaaagagagaaagagaataaaaatatttttgtaaaactttttttatgagaccatcaaagagagaaagagaataaaaatatttttgtaaaactttttttatgagaccatcaaagagagaaagagaataaaaatatttttgtaaaactttttttatgagaccatcaaagagagaaagagaataaaaatatttttgtaaaactttttttatgagaccatcaaagagagaaagagaataaaaatatttttgtaaaactttttttatgagaccatcagaaagaggtttaatatttttgtgataccctgaaaggaaataggaataggaataggaatagtgtcataatcgtatcacactattgagacagaaaaagaagaagtcgcgagaggtaactttttgtgaatgtagttaagaacatttttgttttgcaaaccggaatatagtgtccggtacacttttttaattcgtggtgtgcctgaatcgttcgattaaccctactcatccaatttcagatgaatagagttatcgattcagacacacgctttgagttttgttgaatcgatgagtgaagtatcatcggttgcaccttcagatgccgatccgtcgacatacttaaatccatccttgacctcaagttcagatgattccttgcacatgtctccgatacgaacgctaaactctagattcttgacacattttgtatcgacgatcgttgaaccgatgatatcttcgtaactcactttcttatgagagatgttagacccgagtactggatgggtcttgatgtcgctgtctttctcttcttcgctacatctgatgtcgatagacacctcacagtctttgatcatagccagagcttcttcatgagtgatcgcgggagagtccttaccttgtcctggggacacgctggacaatctagcattcactgtgtttccatcagcggattctgagatggatttaatctgaggacatttggtgaatccaaagttcattctcagacctccaccgatgatggagtaataagtggtaggaggatctacatcctcgactgatgtggaatcatcttctgattccacctcgggatctggatctgactcggactctgtaatttccgttacggattggcaaatcttatcattggtcggtgtttggtcttgctttgtgactttgataataacatcgattcccatatgatgtttgttttcttcttccgtacacgaggaggaggatgaggatgattgctgaagactggcaggcacatgcatgccaggacgatatattgtttcatgattgctattgattgagtactgttctttatgattctacttccttaccgtgcaataaattagaatatattttctacttttacgagaaattaattattgtatttattatttatgggtgaaaaacttactataaaaagcgggtgggtttggaattagtgatcagtttatgtatatcgcaactaccgggcatatggctatcgacatcgagaacattacccacatgataagagattgtatcagtttcgtagtcttgagtattggtattactatatagtatatagatgtcgacgctagatagacagtctccgaatgcggcatgataccgtcatcattctttgctttcgttaactgtttggaggaaaaatttttgttattgcatttaatctcgaaattcagagtgcacacctttctcctgtaaagaaacctgaagttgctaccttattaaggacggagaagtattcctcacgaaatacgggattacagtctttatgattcatagtaatagttagttccgacgttgagatggattcgctgagaccggtagtggtcgttaactggatacagattaatttccacatcgatatagttaaaggtattactgggtacgggttcgcatttatctgcggaagagacggtgtgagaatatgttccgagaccacacggagaacagatgacgtctccggatactccgtatcctattccacattttgtttgggaaacacatgccttgcatccggatgatcctttgagaagacaataatatccgggagagcattcacagattctattgtgagtcgtgttacacggtcgcgtcttccgttacaacttagacaagcgggtaaatgattattgcgagatgtgaaggtacccgaaccacacggcgtacattgtgtgttagtcttgctatcgcataatctggaagcgtatgttcccggacacaaattatggcgtttgtattcgttgtctttacactttccatcggatggtgcatgcggtgctatatctcttccgtttattattatacatgagagaaacaatatatacgagtataatacggacttcatgatttaataatgtagtaatcgtcgtcttgttcctgtttcctacttctccaatcatatagatattttctttctatcatggataatatttgtaatggttcttttcgtacaacatactgtttagatgatattgcgcataatttccggaggcaaatacgatagtctagattgaccgatggtagactctaatttattgagtgctttgtcgacgagtttacttttacgctccatcgatagatggcactgttctatgagatcgtcgtacatgggaaatgaaatgtgactgtctgaatgtatggctttaagatagctgtgataccgtatacaggtcggtgtcggagattcgaatctctttaaggcgacttatgtcacgatgatggaatctatcttatcgaatgatatatttttcataaatacacttttatagtcctcgtttaaacagaatttactatgtagttccgcgaatgactcgtcccttaataggcagtaggctattatcttctttacgtagtaatcgtcgtagggagagacatcttgtagaacaacgatttaatcataggtagagatactttcagtctgtggtggatgatgtcattcacaacatccgccttgtatatgatgtttctgttttcaaacaccaagtcgaataccgtctttagtcggaaggttgatgtcgtatccgatgtatgaggcaacattgttgttacaattttgaaaggcggtattatagtattcgtctttctgaatgtcgaacctatctagtagataccgtagtatattgagagtgtatccttgattatgttttatgaatagataaagtagatgttgtccttcttccttttgttcgtgccaattgagtaacattatgagaatatgacctgttgcacaatcgttccatgatgggtgtacaatcaagattattacgtatcctcgtatcggctcctcgagataaaagagcatacaccacacgaggactatgtttggtatactgttgaaggtaagtgtgtaaccgcgttaatgtttgctccataatctattatcgcgtagatgaatcgcttctcggctcgcatcttagtgtgacttaacttgtaataattgcttttgtagaacgtggatatgtgtttacagtagtaatgaagagaagtgagttcatcctcgtcggatcctttgtacagaacgtaatagtttaagctcccattgaatttatatctaagataacacagcaatagatcggatgatttactaaagtcatcaatggtgtccgttagtatatcaaagatcttgttatcgattgatagtggtgtcctttttcatccttgctatcaaagttacgcatgccgtggtgtaacaatatctttaatacagatggattaaatcgtgtattcatcgtatagcaatgtaatggagagttacctcgtttattcagatcgcagtgtttaataactagcttaaacagatgagacgatgtatccacatcaaagaacgtgaaatacatatgacagacattgttgacagaaacgtgaccttcattcttaccgtcgtccataaatacgttaggtatgtaccacatactgtcgcgaacgatgcgtacaatctcgtccatctcataatgatttactttttcataattaaagatgtgaaagaaaaacagaacaatatatttttttagtaatgtttatgcgagacatataaaataaactccgtgtttatgatcatttttaacagcaacacattcaatattgtattgttatttttatattatttacacaattaacaatatattattagtttatattactgaattaataatataaaattcccaatcttgtcataaacacacactgagaaacagcataaacacaaaatccatcaaaaatgtcgatgaaatatctgatgttgttgttcgctgctatgataatcagatcattcgccgatagtggtaacgctatcgaaacgacatcgccagaaattacaaacgctacaacagatattccagctatcagattatgcggtccagagggagatggatattgtttacacggtgactgtatccacgctagagatattgacggtatgtattgtagatgctctcatggttatacaggcattagatgtcagcatgtagtattagtagactatcaacgttcagaaaacccaaacactacaacgtcatatatcccatctcccggtattatgcttgtattagtaggcattattattattacgtgttgtctattatctgtttataggttcactcgacgaactaaactacctatacaagatatggttgtgccataatttttataaatttttttatgagtatttttacaaaaaaaatgtataaagtgtatgtcttatgtatatttataaaaatgctaagtatgcgatgtatctatgttatttgtatttatctaaacaatacctctacctctagatattatacaaaaattttttatttcggcatattaaagtaaaatctagttaccttgaaaatgaatacagtgggtggttccgtatcaccagtaagaacataatagtcgaatacagtatccgattgagattttgcatacaatactagtctagaaagaaatttgtaatcatcttctgtgacgggagtccatatatctgtatcatcgtctagtttatcagtgtcccatgctatattcctgttatcatcattagttaatgaaaataactctcgtgcttcagaaaagtcaaatattgtatccatacatacatctccaaaactatcgcttatacgtttatctttaacgatacctatacctagatggttatttactaacagacattttccagatctattgactataactcctatagtttccacatcaaccaagtaatgatcatctattgttatataacaataacataactcttttccatttttatcagtatgtatatctatatcaacgtcgtcgttgtagtgaatagtagtcattgatctattatatgaaacggatatgtctagaacggcaattgttttacgtccagttaacactttctttgatttaaagtctagagtctttgcaaacataatatccttatccgactttatatttcctgtagggtggtataattttattttgcctccacatatcggtgtttccaaatatattactagacaatattccatatagttattagttaagggtacccaattagaacacgtacgcttattatcatcatttggatcgtatttcataaaagttattgtactatcgatgtcaacacattctacattttttaatcgtctatatagtatttttctgatattttctataatatcagaattgtcttccatcggaagttgtatactatcggaatcagttacatgtttaaataattctctgatgtcattccttatacaatcaaattcattattaaacagtttaatagtctgtagacctttatcgtcgtaaatatccattgtcttattagttacgcttatttttatgtgttttacgttgctttattatattttataagaatgattgtttgacgaatcacgagaactattaagacacattattaggtatatattataaaaaagtttttgattacgatgttataagaggaaagaggacacattaacatcatacatcaattaactacattcttataacatcgtaatcaaaagaattgcaattttgatgtataacaactgtcaatgggttatggaattgtatattacatattatacggtatgttggtaacgacaaataccgatcggtaattgtctgccggtgtaatagaattatatatatctatctattacaccggctgagtatgcataataataagttgtggtagtatgatctccatatttataatttaggactttgtattcagtatttttggaatcataaaaaataaaaaaaagttttactaatttaaaatttaaaaagtatttacatttttttcactgtttagtcgcggatatggaattcgatcctgccaaaatcaatacatcatctatagatcatgtaacaatattacaatacatagatgaaccaaatgatataagactaacagtatgcattatccgaaatattaataacattacatattatatcaatatcacaaaaataaatacacatttggctaatcaatttcgggcttggaaaaaacgtatcgccggaagggactatatgactaacttatctagagatacaggaatacaacaatcaaaacttactgaaactatacgtaactgtcaaaaaaatagaaacatatatggtctatatatacactacaatttagttattaatgtggttattgattggataaccgatgtgattgttcaatcaatattaagagggttggtaaattggtacatagctaataatacctatacacccaataatacaacaaccatttctgagttggatatcatcaaaatactggataaatacgaggacgtgtatagagtaagtaaagaaaaagaatgtggaatttgctatgaagttgtttactcaaaacgatagatactttggtttattggattcgtgtactcatatattttgcataacatgcatcaatatatggcataaaacacgaagagaaaccggtgcgtcggataattgtcctatatgtcgtacccgttttagaaacataacaatgagcaagttctataagctagttaactaataaataaaaagtttaatttgttgacgacgtatgtcgttatttttctcgtatgaaagattaaattcaattcaattcgttgtttctaatataatctgccgtattggatggattctcaagacaattgcatttagattatattatcatgaataaaaatagtagcacgcactacttcagccaaatattcttttttgaaacgccatctatcgtagtgaggacacaagtgaacctataattatcaaatttattagtatcagtcacatgaaggactttctgtagagtgacgattctaccatctatggtactaacggtttcatcctccttgataccctcacccaaatgttctataaatttagcatcctcgtccgatctcatatcctttgccaaccaatacatgtagctaaaattaggcataaatttcacacatccagtgcaacgaaattctccagaagatgttacgatgtttaggttaggacatttgatttcgtcggcattaacatatgggtgaacacacccatacatgaaagcgatgagaaataggattctcatcttgccaaaatatcactagaaaaaatttatttatcaattttaaaggtataaaaaatacttattgttgctcgaatattttgtatttgatggtatacggaagattagaaatgtaggtattatcatcaactgattctatggttttatgtattctatcatgtttcactattgcgtcggaaataatatcatatgcttccacatatattttattttgttttaactcataatactcacgtaattctggattattggcatatctatgaataattttagctccatgatcagtaaatattaatgagaacatagtattaccacctaccattatttttttcatttcgttcaattcttgattgcaaagatctatataatcattatagcgttgacttatggactctggaatcttagacgatgtacagtcatctataatcatggcatatttaatacattgttttatagcatagtagttatctacgatgttagatatttctctcaatgaatcaatcacacaatctaatgtaggtttatgacataatagcattttcagcagttcaatgtttctagattcgttgatggcaatggctatacatgtatatccgttatttgatctaatgttgacatctgaaccggattctagcagtaaagatactagagattgtttattatatctaacagccttgtgaagaagtgtttctcctcgtttgtcaatcatgttaatgtctttaagataaggtaggcaaatgtttatagtactaagaattgggcaagcataagacatgtcacaaagaccctttttgtatgtataagtgtaaaaattataacattcatagttggatttacataggtgtccaatcgggatctctccatcatcgagataattgatggcatctcccttccttttttagtagatatttcatcgtgtaagaatcaatattaatatttctaaagtattcgtgtatagcctctttatttaccacagttccatattccactagagggatatcgccgaatgtcatatactcaattagtatatgttggaggacatccgagttcattgttttcaatatcaaaaagatggtttccttatcatttctccatagtggtacaatactacacattattccgtgcggctttccattttccaaaaacaatttgaccaaatctaaatctacatctttattgtatctataatcactatttagataatcagccataattactcgagtgcaacatgttagatcgtctatatatgaataagcagtgttatctattcctttcattaacaatttaacgatgtctatatctatatgagatgacttaatataatattgaagagctgtacaatagtttttatctatagaagacggcttgattccgtgattaattagacatttaacaacttccggacgcacatatgctctcgtatccgactttgaatacagatgagagatgatatacagatgcaatacggtaccgcaatttcgtagttgataatcatcatacgcgtatcagtactcgtcctcataaagaacactgcagccattttctatgaacaaatcaataattttaggaacaggatcattgtcattacataattttctataactgaacgatggttttcacatttaacactcaagtcaaatccatgttctaccaacacctttatcaagtcaacgtctacatttttggatttcatatagctgaatatattaaagtcatttatgttgctaaatccagtggcttctagtagagccatcgctatatcctttaactttaacatgtctactatttgtgtattcttctaatggggtagctgtctccaatttttgcgtaatggattagtgccactgtctagtagtagtttgacgacctcgacattattacaatgctcattaaaaaggtatgcgtgtaaagcattattcttgaattggttcctggtatcattaggatctctgtctctcaacatctgtttaagttcatcgagagccacctcctcattttccagatagtcaaacattttgactgaatgagctactgtgaactctatacacccacacaactaatgtcattaaatattatttttttgaatgtatttataccatgtcaaaaacttgtacaattattaataaaaataatttagtgtttaaattttaccagttccagattttacacctccgttaaccccactttttacaccactggacgatcctcctccccacattccaccgccaccagatgtataagttttagatcctttattactaccatcatgtccatggataaagacactccacatgccgccactactaccccctttagaagacatattaataagacttaaggacaagtttaacaataaaattaatcacgagtaccctactaccaacctacactattatatgattatagtttctatttttacagtaccttaactaaagtctctagtcacaagagcaatactaccaacctacactattatatgattatagtttctatttttataggaacgcgtacgagaaaatcaaatgtctaatttctaacggtagtgttgataaacgattatcgtcaatggatacctcctctatcatgtcgtctattttcttactttgttctattaacttattagcattatatattatttgattataaaacttatattgcttattagcccaatctgtaaatatcggattattaacatatcgtttctttgtaggtttatttaacatgtacatcactgtaagcatgtccgtaccatttattttaatttgacgcatatccgcaatttctttttcgcagtcggttataaattctatatatgatggatacatgctacatgtgtacttataatcgactaatatgaagtacttgatacatattttcagtaacgatttattattaccacctatgaataagtacctgtgatcgtctaggtaatcaactgttttcttaatacattcgatggttggtaatttactcagaataatttccaatatcttaatatataattctgctatttctgggatatatttatctgccagtataacacaaatagtaatacatgtaaacccatattttgttattatattaatgtctgcgccattatctattaaccattctactaggctgacactatgcgacttaatacaatgataaagtatactacatccatgtttatctattttgtttatatcatcaatatacggcttacaaagttttagtatcgataacacatccaactcacgcatagagaaggtagggaataatggcataatatttattaggttatcatcattgtcattatctacaactaagtttccattttttaaaatatactcgacaactttaggatctctattgccaaatttttgaaaatatttatttatatgcttaaatctatataatgtagctccttcatcaatcatacatttaataacattgatgtatactgtatgataagatacatattctaacaatagatcttgtatagaatctgtatatcttttaagaattgtggatattaggatattattacgtaaactattacacaattctaaaatataaaacgtatcacggtcgaataatagttgatcaactatataattatcgattttgtgatttttcttcctaaactgtttacgtaaatagttagatagaatattcattagttcatgaccactatagttactatcgaataacgcgtcaaatatttcccgtttaatatcgcatttgtcaagataataatagagtgtggtatgttcacgataagtataataacgcatctcttttttgtgtgaaattaaatagtttatcacgtccaaagatgtagcataaccatcttgtgacctagtaataatataataatagagaactgttttacccattctatcatcataatcagtggtgtagtcgtaatcgtaatcgtctaattcatcatcccaattataatattcaccagcacgtctaatctgttctattttgatcttgtatccatactgtatgttgctacatgtaggtattcctttatccaataatagtttaaacacatctacattgggatttgatgttgtagcgtatttctctacaatattaataccatttttgatactatttatttctatacctttcgaaattagtaatttcaataagtctatatcgatgttatcagaacatagatattcgaatatatcaaaatcattgatatttttatagtcgactgacgacaataacaaaatcacaacatcgtttttgatattattatttttcttggtaacgtatgcctttaatggagtttcaccatcatactcatataatggatttgcaccactttctatcaatgattgtgcactgctggcatcgatgttaaatgttttacaactatcatagagtatcttatcgttaaccatgattggttgttgatgctatcgcattttttggtttctttcatttcagttatgtatggatttagcacgtttgggaagcatgagctcatatgatttcagtactgtagtgtcagtactattagtttcgatcagatcaatgtctagatctatagaatcaaaacacgataggtcagaagataatgaatatctgtacgcttctttttgtactgtaacttctggttttgttagatggttgcatcgtgctttaacatcaatggtacaaattttatcctcgctttgtgtatcatattcgtctctagtataaaattctatattcagattatcatgcgatgtgtatacgctaacggtatcaataaacggagcacaccatttagtcataacagtaatccaaaattttttaaagtatatcttaacgaaagaagttgtgtcattgtctacggtgtatggtactagatcctcataagtgtatatatctagagtaatgtttaatttattaaatggttgataatatggatcctcatgacaatttccgaagatggaaatgagatatagacatgcaataaatctaatcgaagacatggttactccttaaaaaaatacgaataatcaccttggctatttagtaagtgtcatttaacactatactcatattaatccatggactcataatctctatacgggattaacggatgttctatatacggggatgagtagttttcttctttaactttatactttttactaatcatatttagactgatgtatgggtaatagtgtttaaagagttcgttctcatcatcagaataaatcaatatctctgtttttttgttatacagatgtattacagcctcatatattacgtaatagaacgtgtcatctaccttattaactttcaccgcatagttgtttgcaaatacggttaatcctttgacctcgtcgatttccgaccaatctgggcgtataatgaatctaaactttaatttcttgtaatcattcgaaataatttttagtttgcatccgtagttatcccctttatgtaactgtaaatttctcaacgcgatatctccattaataatgatgtcgaattcgtgctgtatacccatactgaatggatgaactaacgaatatcaacggcgttaatagtaatttactttttcatctttacatattgggtactagttttactatcataagtttataaattccacaagctactatggaataagccaaccatcttagtataccacacatgtcttaaagtttattaattaattacatgttgttttatatatatcgctacgaatttaaagagaaatcagtttaggaagaaaaaaattatctatctacatcatcacgtctctgtattctacgatagagtgctactttaagatgagacatatccgtgtcatcaaaaatatactccattaaaatgattattccggcagcgaacttgatattggatatatcacaacctttgttaatatctacgacaatagacagcagtcccatggttccataaacagtgagtttatctttctttgaagcgatagtttgtagagatcttataaaaccgtcaaacgacatcgcatttatatctttagctaattcatatatgttaccatcgtaatatctaaccgcgtctatcttaaacgtttccatcgctttaaagacgtttccgatagatggtctcatttcatcagtcatactgagccaacaaatataatcgtgtataacatctttgatagaatcagactctaaagaaaacgaatcggctttattatacgcattcatgataaacttaatgaaaaatgtttttcgttgtttaagttggatgaatagtatgtcttaataattgttattatttcattaattaatatttagtaacgagtacactctataaaaacgagaatgacataactagttatcaaagtgtctaggacgcgtaattttcatatggtatagatcctgtaagcattgtctgtattctggagctattttctttatcgcattagtaagttcagaatatgttataaatttaaatcgaataacgaacatgactttagtaaagtcgtctatattaactcttttattttctagccatcgtaataccatgtttaagatagtatattctctagttactacgatctcatcgttgtctagaatatcacatactgaatctacatccaattttagaaattggtctgtgttacatatctcttctatattattgttgatgtattgtcgtagaaaactattacgtagaccattttctttataaaacgaatatatagtactccaattatctttaccgatatatttgcacacataatccattctctcaatcactacatctttaagattttcgttgttaagatatttggctaaactatataattctattagatcatcaacagaatcagtatatatttttctagatccaaagacgaactctttggcgtcctctataatattcccagaaaagatattttcgtgttttagtttatcgagatctgatctgttcatatacgccatgattgtacggtacgttatgataaccgcataaaataaaaatccattttcatttttaaccaatactattcataattgagattgatgtaatactttgttactttgaacgtaaagacagtacacggatccgtatctccaacaagcacgtagtaatcaaatttggtgttgttaaacttcgcaatattcatcaatttagatagaaacttatactcatcatctgttttaggaatccatgtattattaccactttccaacttatcattatcccaggctatgtttcgtccatcatcgttgcgcagagtgaataattcttttgtattcggtagttcaaatatatgatccatgcatagatcggcaaagctattgtagatgtgatttttcctaaatctaatataaaactcgtttactagcaaacactttcctgatttatcgaccaagacacatatggtttctaaatctatcaagtggtggggatccatagttatgacgcagtaacatagattattacattcttgactgtcgctaatatctaaatatttattgttatcgtattggattctgcatatagatggcttgtatgtcaaagatatagaacacataaccaatttatagtcgcgctttacattctcgaatctaaagttaagagatttagaaaacattatatcctcggatgatgttatcactgtttctggagtaggatatattaaagtctttacagatttcgtccgattcaaataaatcactaaataatatcccacattatcatctgttagagtagtatcattaaatctattatattttatgaaagatatatcactgctcacctctatatttcgtacatttttaaactgtttgtataatatctctctgatacaatcagatatatctattgtgtcggtagacgataccgttacatttgaattaatggtgttccattttacaacttttaacaagttgaccaattcatttctaatagtatcaaactctccatgattaaatattttaatagtatccattttatatcactacggacacaaagtagctgacataaaccattgtataatttttatgttttatgtttattagcgtacacattttggaagttccggcttccatgtatttcctggagagcaagtagatgatgaggaaccagatagtttatatccgtacttgcacttaaagtctacattgtcgttgtatgagtatgatcttttaaacccgctagacaagtatccgtttgatattgtaggatgtggacatttaacaatctgacacgtgggtggatcggaccattctcctcctgaacacaggacaccagagttaccaatcaacgaatatccactattgcaactataagttacaacgctcccatcggtataaaaatcctcgtatccgttatgtcttccgttggatatagatggaggggattggcatttaacagattcacaaataggtgcctcgggattccataccatagatccagtagatcctaattcacaatacgatttagattcaccgatcaaatgatatccgctattacaagagtacgttatactagagccaaagtctactccaccaatatcaagttggccattatcgatatctcgaggcgatgggcatctccgtttaatacattgattaaagagtgtccatccagtacctgtacatttagcatatataggtcccattttttgctttctgtatccaggtagacatagatattctatagtgtctcctatgttgtaattagcattagcatcagtctccacactattcttaaatttcatattaatgggtcgtgacggaatagtacagcatgatagaacgcatcctattcccaacaatgtcaggaacgtcacgctctccaccttcatatttatttatccgtaaaaatgttatcctggacatcgtacaaataataaaaagcccatatatgttcgctattgtagaaattgtttttcacagttgctcaaaaacgatggcagtgacttatgagttacgttacactttggagtctcatctttagtaaacatatcataatattcgatattacgagttgacatatcgaacaaattccaagtatttgattttggataatattcgtattttgcatctgctataattaagatataatcaccgcaagaacacacgaacatctttcctacatggttaaagtacatgtataattctatccatttgtcttccttaactatatatttgtatagataattacgagtctcgtgagtaattccagtaattacatagatgtcgccgtcgtactctacagcataaactatactatgatgtctaggcatgggagacttttttatccaacgatttttagtgaaacattccacatcgtttaatactacatatttttcatacgtggtataaactccacccattacatatatatcatcgtttacgaataccgacgcgcctgaatatctaggagtaattaagtttggaagtcttatccatttcgaagtgccgtgtttcaaatattctgccacacccgttgaaatagaaaattctaatcctcctattacatataactttccatcgttaacacaagtactaacttctgattttaacgacgacatattagtaaccgttttccattttttcgtttcaagatctacccgcgatacggaataaacatgtctattgttaatcatgccgccaataatgtatagacaattatgtaaaacatttgcattatagaattgtctatctgtattaccgactatcgtccaatattctgttctaggagagtaatgggttattgtggatatataatcagagtttttaatgactactatattatgttttataccatttcgtgtcactggctttgtagatttggatatagttaatcccaacaatgatatagcattgcgcatagtattagtcataaacttgggatgtaaaatgttgatgatatctacatcgtttggatttttatgtatccactttaataatatcatagctgtaacatcctcatgatttacgttaacgttttcgtgggataagatagttgtcagttcatcctttgataattttccaaattctggatcggatgtcaccgcagtaatattgttgattatttctgacatcgacgcattatatagttttttaattccatatcttttagaaaagttaaacatccttatacaatttgtggaattaatattatgaatcatagtttttacacatagatctactacaggcggaacatcaattattatggcagcaactagtatcatttctacattgtttatggtgatgtttatcttcttccagcgtatatagtctaatagcgattcaaacgcgtgatagtttataccattcaatataatcgcttcatcctttagatggtgatcctgaattcgtttaaaaaaattatacggagatgccgtaataatttccttattcacttgtataatttccccattgatagaaaatatcacgctttccattcttgaagtactataagtaattatagtataatgtaaaggtttatatattcaatattttttataaaaaaatcattttgacattaattcctttttaaatttccgtctatcatctatagaaacgtattctatgaatttataaaatgcttttacgtgtcctatcgtaggcgatagaaccgctaaaaagcctatcgaatttctacaaaagaatctgttatatggtatagggagagtataaaacattaaatgtccgtacttattaaagtattcagtagccaatcctaactctttcgaatacttattaatggctcttgttctgtacgaatctatttttttgaacaacggacctagtggtatatcttgttctatgtatctaaaataatgtctgactagatccgttagtttaatatcctcagtcatcttgtctagaatggcaaatctaactgcgggtttaggctttagtttagtttttatatctacatctatgtctttatctaacaccaaaaatataatagctaatattttattacaatcatccggatattcttctacgatctcactaactaatgtttctttggttatactagtatagtcactatcggacaaataaagaaaatcagatgatcgatgaataatacatttaaattcatcatctgtaagatttttgagatgtctcattaaaatattattagggtcagtactcattatcattcggcagctattacttattttatttttctgtattttattatttttcaccatatagatcaatcattagatcatcaaaatatgtttcaatcatcctaaagagtatggtgaatgactcttcccatctaatttctgaacgttcaccaatgtctctagccactttggcactaatagcgatcattcgcttagcgtcttctatattattaactggttgattcaatctatctagcaatggaccgtcggacagcgtcattctcatgttcttaatcaatgtacatacatcgccgtcatctaccaattcatccaacaacataagctttttaaaatcatcattataataggtttgatcgttgtcatttctccaaagaatatatctaataagtagagtcctcatgcttagtaatttaactattttagttaacaactattttttatgttaaatcaattagtacaccgctatgtttaatacttattcatattttagtttttaggattgagaatcaatacaaaaaattaatgcatcattaattttagaaatacttagtttccacgtagttaatgaaacatttgaactcatcgtacaggacgttctcgtacaggacgtaactataaaccggtttatatttgttcaagatagatacaaatccgataactttttttacgaattctacgggatccactttaaaagtgtcataccgggttctttttattcttttaaacagatcaatggtgtgatgttgattaggtcttttacgaatttgatatagaatagcgttcacatatcctccataatggtcaatcgccatttgttcgtatgtcataaattctttaattatatgacactgtgtattatttagttcatccttgttcatcattaggaatctatccaaaatggcaattatactagaactataggtgcgttgtatacacatattgatgtgtctgtttatacaatccatgatatttggatccatgctactaccttcgggtaaaattgtagcatcatataccatttctagtactttaggttcattattatccattgcagaggacgtcatgatcgaatcctaaaaaaatatattatttttatgttattttgttaaaaataatcatcgaatacttcgtaagatactccttcatgaacataatcagttacaaaacgtttatatgaagtaaagtatctacgatttttacaaaagtccggatgcataagtacaaagtacgcgataaacggaataataatagatttatctagtctatctttttctatagctttcatagttagatacatggtctcagaagtaggattatgtaacatcagcttcgataaaatgactgggttatttagtcttacacattcgctcatacatgtatgaccgttaactacaaagtctacactaaaatgattgaacaatagatagtctaccattgtttcgtattcagatagtacagcgtagtacatagcatcttcacaaattatatcattgtctaatagatatttgacgcatcttatggatcccacttcaacagccatcttaaaatcggtagaatcatattgctttcctttatcattaataatttctaaaacatcatctctatcataaaagatacaaatattaactgtttgatccgtaataacattgctagtcgatagcaatttgttaataagatgcgctgggctcaatgtcttaataagaagtgtaagaggactatctccgaatttgttttgtttattaacatccgttgatggaagtaaaagatctataatgtctacattcttgactgttttagagcatacaatatggagaggtgtatttccatcatgatctggttttgagggactaattcctagtttcatcatccatgagattgtagaagcttttggattgtctgacataagatgtctatgaatatgatttttgccaaatttatccactatcctggcttcgaatccgatggacattatttttttaaacactctttctgaaggatctgtacacgccaacaacggaccacatccttcttcatcaaccgagttgttaatcttggctccatactgtaccaataaatttattctctctatgacttcatcatctgttcccgagagataatatagaggtgttttattatgtttatcacacgcgtttggatctgcgccgtgcgtcagcagcatcgcgactattctattattattaattttagaagctatatgcaatggataatttccatcatcatccgtctcatttggagagtatcctctatgaagaagttcttcgacaaatcgttcatctagtcctttaattccacaatacgcatgtagaatgtgataattatttccagaaggttcgatagcttgtagcatattcctaaatacatctaaatttttactattatatttggcataaagagatagataatactcggccgacataatgttgtccattgtagtataaaaattaatatttctatttctatttctgtatatttgcaacaatttactctctataacaaatatcataacttagttcttttatgtcaagaaggcactggtttagttcatctataaatgtcacgccataactaccacgcatgctatactcagaattatgataaagatatttatccttggggtgtaggtaatggggattaatctttgttggatcagtctctaagttaacacatgtcacacatgatccatttatagttatatcacacgatgatgatttatgaattgattccggaagatcgctatcgtattttgtggttccacaattcatttccatacatgttattgtcacactaatattatgatgaactttatctagccgctgagtggtaaacaacagaacagatagtttattatctttaccaacaccctcagccgctgccacaaatctctgatccgtatccatgatggtcatgtttatttctagtccgtatccagtcaacactatgttagcatttctgtcgatatagctttcactcatatgacactcaccaataatagtagaattaatgtcgtaatttacaccaatagtgagttcggcggcaaagtaccaataccggtaatcttgtcgaggaggacatatagtattcttgtattctaccgaatacccgagagatgcgatacaaaagagtaagactaatttgtaaaccatcttactcaaaatatgtaacaatagtacgatgcaatgagtaagacaataggaaatctatcttatatacacataattattctatcaattttaccaattagttagtgtaatgttaacaaaaatgtgggagaatctaattagtttttctttacacaattgacgtacatgagtctgagttccttgtttttgctaattatttcatccaatttattattcttgactatatcgagatcttttgtataggagtcagacttgtattcaacatgcttttctataatcattttagctatttcggcatcatccaatagtacattttccagattagcagaatagatattaatgtcgtatttgaacagagcctgtaacatctcaatgtctttattatctatagccaatttaatgtccggaatgaagagaagggaattattggtgtttgtcgacgtcatatagtcgagcaagagaatcatcatatccacgtgtccattttttatagtgatgtgaatacaactaaggagaatagccagatcaaaagtagatggtatctctgaaagaaagtaggaaacaatacttacatcattaagcatgacggcatgataaaatgaagttttccatccagttttcccatagaacatcagtctccaatttttcttaacaaacagttttaccgtttgcatgttaccactatcaaccgcataatacaatgcggtgtttcccttgtcatcaaattgtgaatcatccagtccactgaatagcaaaatctttactattttggtatcttccaatgtggctgcctgatgtaatggaaattcattctctagaagatttttcaatgctccagcgttcaacaacgtacatactagacgcacgttattatcagctattgcataatacaaggcactatgtccatggacatccgccttaaatgcatctttgctagagagaaagcttttcagctgcttagacttccaagtattaattcgtgacagatccatgtctgaaacgagacgctaattagtgtatattttttcattttttataattttgtcatattgcaccagaattaataatatctctaatagatctgattagtagatacatggctatcgcaaaacaacatatacacatttaataaaaataatatttattaagaaaattcagatttcacgtacccatcaatataaataaaataatgattccttacaccgtacccatattaaggagattccaccttacccataaacaatataaatccagtaatatcatgtctgatgatgaacacaaatggtgtattaaattccagtttttcaggagatgatctcgccgtagctaccataatagtagatgcctctgctacagttccttgttcgtcgacatctatctttgcattctgaaacattttataaatatataatgggtccctagtcatatgtttaaacgacgcattatctggattaaacatactaggagccatcatttcggctatcgacttaatatccctcttattttcgatagaaaatttagggagtttaagattgtacactttattccctaattgaaacgaccaatagtctaattttgcagccgtaatagaatctgtgaaatgggtcatattatcacctattgccaggtacatactaatattagcatccttatacggaaggcgtaccatatcatattcttcgtcatcgattgtgattgtatttccttgcaatttagtaactacgttcatcatgggaaccgttttcgtaccgtacttattagtaaaactagcattgcgtgttttagtgatatcaaacggatattgccatatacctttaaaatatatagtattaatgattgcccatagagtattattgtcgagcatattagaatctactacattagacataccggatctacgttctactatagaattaattttattaaccgcatctcgtctaaagtttaatctatataggccgaatctatgatattgttgataatacgacggtttaatgcacacagtattatctacgaaactttgataagttagatcagtgtacgtatatttagatgttttcagcttagctaatcctgatattaattctgtaaatgctggacccagatctctttttctcaaatccatagtcttcaataattctattctagtattacctgatgcaggcaatagcgacataaacatagaaaacgaataaccaaacggtgagaagacaatattatcatcttgaatatttttatacgctactataccggcattggtaaatccttgcagacgataggtagacactgaacacgttaacgatagtatcaataacgcaatcatgattttatggtattaataattaaccttatttttatgttcggtataaaaattattgatgtctacacatccttttgtaattgacatctatatatccttttgtataatcaactctaatcactttaacttttacagttttccctaccagtttatccctatattcaacatatctatccatatgcatcttaacactctctgccaagatagcttcaaagtgaggatagtcaaaaagataaatatatagagcataatccttctcgtatactctgccctttattacatcacccgcattgggcaacgaataacaaaatgcaagcatcttgttaacgggctcgtaaattgggataaaaattatgtttttatatctattttattcaagagaatattcaggaatttctttttccggttgtatctcatcgcagtatatatcatttgtacattgtttcatattttttaatagtctacaccttttagtaggactagtatcgtacaattcatagctgtattttgaattccaatcacgcataaaaatatcttccaattgttgacgaagacctaatccatcatccggtgtaatattaatagatgctccacatgtatccgtaaagtaatttcctgtccaatttgaggtacctatatacgccgttttatcggttaccatatatttggcatggtttaccctagaatacggaatgggaggatcagcatctggtacaataaatagctttacttctatatttatgtttttagattttagcatagcgatagatcttaaaaagtttctcatgataaacgaagatcgttgccagcaactaatcaatagcttaactgacacttgtctgtctatagcggctcttcttaattcatcttctatataaggccaaaacaaaatattgcctgccttcgaataaataatagggataaagttcataacagatacataaacgaatttactcgcatttctgatacatgacaataaagcggttaaatcattggttctttccatagtacatagttgttgcggtgcagaagcaataaatacagagtgtggaacgccgcttacgttaatactaagaggatgatctgtattataatacgacggataaaagtttttccaattatatggtagattgttaactccaagataccagtatacctcaaaaatttgagtgagatccgctgccaagttcctattattgaagatcgcaatacccaattctttgacctgagttagtgatctccaatccatgttagcgcttcctaaataaatatgtgtattatcagatatccaaaattttgtatgaagaactcctcctaggatatttgtaatatctatgtatcgtacttcaactccggccatttgtagtctttcaacatcctttaatggtttgttagatttattgacggctactctaactcgtactcctcttttgggtaattgtacaatcttgtttaatattatcgtgccgaaattcgtacccacttcatccgataaactccaataaaaagatgatatatctagtgtttttgtggtattggatagaatttccctccacatgttaaatgtagacaaatatactttatcaaattgcatacctataggaatagtctctgtaatcactgcgattgtattatccggattcattttatttgttaaaagaataatcctatatcacttcactctattaaaaatccaagtttctatttctttcatgactgattttttaacttcatccgtttccttatgaagatgatgtttggcaccttcataaatttttatttctctattacaatttgcatgttgcatgaaataatatgcacctaaaacatcgctaatcttattgtttgttccctggagtatgagagtcggggggtgttaatcttggaaattatttttctaaccttgttggtagccttcaagacctgactagcaaatccagccttaattttttcatgattgattaatgggtcgtattggtatttataaactttatccatatctctagatactgattctggacatagctttccgactggcgcatttagtgtgatggttcccataagtttggcagctagcagattcagttttgaaacagcatctgcattaactagaggagacattagaatcattgctgtaaacaagtttggattatcgtaagaggctagctcccatggaatgacccaataagtagatttaatagttaccacgtgctgtaccaaagtcatcaatcatcattttttcaccattacttcttccatgtccaatatgatcatgtgagaatactaaaattcctaacgatgatatgttttcagctagttcgtcataacgtccagaatgtttaccagctccatgacttatgaatactaatgccttaggatatgtaataggtttccaatatatgtaatcattgtccagattgaacatacagtttgcactcatgattcacgttatataactatcaatattaacagttcgtttgatgatcatattatttttatgttttattgataattgtaaaaacatacaattaaatcaatatagaggaaggagacggctactgtcttttgtgagatagtcatggcgactaaattagattatgaggatgctgttttttactttgtggatgatgataaaatatgtagtcgcgactccatcatcgatctaatagatgaatatattacgtggagaaatcatgttatagtgtttaacaaagatattaccagttgtggaagactgtacaaggaattgatgaagttcgatgatgtcgctatacggtactatggtattgataaaattaatgagattgtcgaagctatgagcgaaggagaccactacatcaattttacaaaagtccatgatcaggaaagtttattcgctaccataggaatatgtgctaaaatcactgaacattggggatacaaaaagatttcagaatctagattccaatcattgggaaacattacagatctgatgaccgacgataatataaacatcttgatactttttctagaaaaaaaattgaattgatgatataggggtcttcataacgcataattattacgttagcattctatatccgtgttaaaaaaaattatcctatcatgtatttgagagttttatatgtagcaaacatgatagctgtgatgccaataagctttagatattcacgcgtgctagtgttagggatggtattatctggtggtgaaatgtccgttatataatctacaaaataatcatcgcatatagtatgcgatagtagagtaaacatttttatcgtttctactgggttcatacatcgtctacccaattcggttataaatgaaattgtcgccaatcttacacccaaccccttgttatccattagtatagtattaacttcgttatttatgtcataaactgtaaatgattttgtagatgccatatcatacatgatattcatgtccctattataatcattactaactttatcacaatatatgttgataatatctatatatgatctagtctttgtgggcaactgtctatacaagtcgtctaaacgttgtttactcatatagtatcgaacagccatcattacatggtcccgttccgttgatagataatcgagtatgttagtggacttgtcaaatctatataccatattttctggaagtggatatacatagtcgtgatcaacattattgctagcctcatcttctatatcctgtactataccattatctatatcatctacataatctacgatattattacacataaacatcgacaacatactattgtttattatctaagtcctgttgatccaaacccttgatctcctctatttgtactatctagagattgtacttcttccagttctggataatatatacgttgatagattagctgagctattctatctccagtatttacattaaacgtacattttccattattaataagaatgactcctatgtttcccctataatcttcgtctattacaccgcctcctatatcaatgccttttagggacagaccagacctaggagctattctaccatagcagaacttaggcatggacatactaatatctgtcttaattaactgtcgttctcctggagggatagtataatcgtaagcgctatataaatcatatccggcggcgtaaggtgattgcctagtaggagatttagctctgttagtttccttaacaaatctaactggtgagttaatattcatgttgaacataaaactaatattttatttcaaaattatttaccatcccatatattccatgaataagtgtgatgattgtacacttctatagtatctatatacgattcacgataaaatcctcctatcaatagcagtttattatccactatgatcaattctggattatccctcggataaataggatcatctatcagagtccatgtattgctggattcacaataaaattccgcatttctaccaaccaagaataaccttctaccgaacactaacgcgcatgatttataatgaggataataagtggatggtccaaactgccactgatcatgattgggtagcaaatattctgtagttgtatcagtttcagaatgtcctcccattacgtatataacattgtttatggatgccactgctggattacatctaggtttcagaagactcggcatattaacccaagcagcatccccgtggaaccaacgctcaacagatgtgggatttggtagacctcctactacgtataatttattgttagcgggtatcccgctagcatacagtctggggctattcatcggaggaattggaatccaattgtttgatatataatttaccgctatagcattgttatgtatttcattgttcatccatccaccgatgagatatactacttctccaacatgagtacttgtacacatatggaatatatctataatttgatccatgttcataggatactctatgaatggatacttgtatgatttgcgtggttgtttatcacaatgaaatattttggtacagtctagtatccattttacattatttatacctctgggagaaagataatttgacctgattacatttttgataaggagtagcagatttcctaatttatttcttcgctttatataccacttaatgacaaaatcaactacataatcctcatctggaacatttagttcatcgctttctagaataagtttcatagatagataatcaaaattgtctatgatgtcatcttccagttccaaaaagtgtttggcaataaagtttttagtatgacataagagattggatagtccgtattctatacccatcatgtaacactcgacacaatattcctttctaaaatctcgtaagataaagtttatacaagtgtagatgataaattctacagaggttaatatagaagcacgtaataaattgacgacgttatgactatctatatatacctttccagtatacgagtaaataactatagaagttaaactgtgaatgtcaaggtctagacaaacccttgtaactggatctttatttttcgtgtatttttgacgtaaatgtgtgcgaaagtaaggagataactttttcaatatcgtagaattgactattatattgccacctatagcatcaataattgttttgaatttcttagtcatagacaatgctaatatattcttacagtacacagtattaacaaatatcggcatttatgtttctttaaaagtcaacatctaaagaaaaatgattatcttcttgagacataactcccattttttggtattcacccacacgtttttcgaaaaaattagtttttccttccaatgatatattttccatgaaatcaaacggattggtaacattataaatttttttaaatcccaattcagaaatcaatctatccgcgacgaattctatatatgttttcatcatttcacaattcattcctataagtttaactggaagagccgcagtaagaaattcttgttcaatggataccgcatctgttataatagatctaacggtttcttcactcggtggatgcaataaatgtttaaacatcaaacatgcgaaatcgcagtgcagaccctcgtctctactaattagttcgttggaaaacgtgagtccgggcattaggccacgctttttaagccaaaatatggaagcgaatgatccagaaaagaagattccttctactgcagcaaaggcaataagtctctctccataaccggcgctgtcatgtatccacttttgagcccaatcggccttcttttttacacaaggcatcgtttctatggcattaaagagatagtttttttcattactatctttaacataagtatcgatcaaaagactatacatttccgaatgaatgttttcaatggccatctgaaatccgtagaaacatctagcctcggtaatctgtacttctgtacaaaatcgttccgccaaattttcattcactattccgtcactggctgcaaaaaacgccaatacatgttttataaaatatttttcgtctggtgttagtttattccaatcattgatatctttagatatatctacttcttccactgtccaaaatgatgcctctgcctttttatacatgttccagatgtcataatattggattgggaaaataacaaatctatttggatttggtgcaaggatgggttccataactaaattaacaataacaataaattttttttcagttatctatatgcctgtacttggatcttttgtacatcgatatcgccgcaatcactacaataattacaagtattattgatagcattgttattagtactatcataattaaattatcgacattcatgggtgctgaataatcgttattatcatcattatcattttgtaattgtgacatcatactagataaatcgtttgcgagattgttgtgggaagcgggcatggaggatgaattatcgttattattatttaacgcctcccattcggattcacaaatgttacgcacattcaacattttatggaaactataattttgtgaaaacagataacaagaaaactcgtcatcgttcaaatttttaacgatagtaaaccgattaaacgtcgagctaatttctaacgctagcgactctgttggatatgggtttccagatatatatcttttcagttcccctacgtatctataatcatctgtaggaaatggaagatatttccatttatctactgttcctaatatcatatgtggtggtgtagtagaaccattaagcgcgaaagatgttatttcgcatcgtattttaacttcgcaataatttctggttagataacgcactctaccagtcaagtcaatgatattagcctttacagatatattcatagtagttgtaacgatgactccatcttttagatgcgatactcctttgtatgtaccagaatcttcgtaccgcaaactcgatatatttaaacaagttaatgagatattaacgcgttttatgaatgatgatatataaccagaagttttatcctcggtggctagcgctataaccttatcattataataccaactagtgtgattaatatgtgacacgttagtgtgggtacaaatatgtacattatcgtctacgtcgtattcgatacatccgcatacagccaacaaatataaaatgacaaatactctaacgccgttcgtacccatcttgatgcggtttaataaatgttttgatttcaatttattgtaaaaaaagattcggttttatactgttcgatattctcattgcttatattttcatctatcatctccacacagtcaaatccgtggttagcatgcacctcatcaaccggtaaaagactatcggactcttctatcattataactctagaatatttaatttggtcattattaatcaagtcaattatcttatttttaacaaacgtgagtattttactcattttttataaaaacttttagaaatatacagactctatcgtgtgtctatatcttctttttatatccaatgtatttatgtctgatttttcttcatttatcatatataatggtccaaattctacacgtgcttcggattcatccagatcattaaggttcttataattgtaacatccttctcttccctcttctacatcttccttcttattcttattcttagcgtcacagaatctaccacagcaggatcccatgacgagcgtcatattaaactaatccattttcaattataatatacgattagtaatgaccattaaaataaaaaatattcttcataaccggcaagaaagtgaaaagttcacattgaaactatgtcagtagtatacatcatgaaatgatgatatatatatactctattttggtggaggattatatgatataattcgtggataatcattcttaagacacatttcttcattcgtaaatcttttcacgttaaatgagtgtccatattttgcaatttcttcatatgatggcggtgtacgtggacgaagctgctcctgttcttgttgtagtcgccgactgtcgtgtttgcgtttagatccctccattatcgcgattgcgtagatggagtactattatataccttgtaattaaatttttttattaattaaacgtataaaaacgttccgtatctgtatttaagagccagatttcgtctaatagaacaaatagctacagtaaaaataactagaataattgctacacccactagaaaccacggatcgtaatacggcaatcggttttcgataataggtggaacgtatattttatttaaggacttaacaattgtctgtaaaccacaatttgcttccgcggatcctgtattaactatctgtaaaagcatatgttgaccgggcggagccgaacattctccgatatctaatttctgtatatctataatattattaacctccgcatacgcattacagttcttttctagcttggataccgcactaggtacatcgtctagatctattcctatttcttcagcgatagctcttctatccttttccggaagcaatgaaatcacttcaataaatgattcaaccatgagtgtgaaactaagtcgagaattactcatgcatttgttagttattcggagcgcgcaatttttaaactgtcctataacctctcctatatgaatagcacaagtgacattagtagggatagaatgttgagctaatttttgtaaataactatctataaaaagattatacaaagttttaaactctttagtttccgccatttatccagtctgagaaaatgtctctcataataaatttttccaagaaactaattgggtgaagaatggaaacctttaatctatatttatcacagtctgttttggtacacatgatgaattcttctaatgctgtactaaattcgatatctttttcgatttctggatatgtttttaataaagtatgaacaaagaaatggaaatcgtaataccagttatgttcaactttgaaattgttttttattttcttgttaatgattccagccacttgggaaaagtcaaagtcgtttaatgccgatttaatacgttcattaaaaacaaactttttatcctttagatgaattattattggttcattggaatcaaaaagtaagatattatcgggtttaagatctgcgtgtaaaaagttgtcgcaacagggtagttcgtagattttaatgtataacagagccatctgtaaaaagataaactttatgtattgtaccaaagatttaaatcctaatttgatagctaactcggtatctactttatctgccgaatacagtgctaggggaaaaattataatatttcctctttcgtattcgtagttagttctcttttcatgttcgaaaaagtgaaacatgcggttaaaatagtttataacattaatattactgttaataactgccggataaaagtgggatagtaatttcacgaatttgatactgtcctttctctcgttaaacgcctttaaaaaaactttagaagaatatctcaatgagagttcctgaccatccatagtttgtatcaataatagcaacatatgaagaacccgtttatacagagtatgtaaaaatgttaatttatagtttaatcccatggcccacgcacacacgattaattttttttcatctccctttagattgttgtatagaaatttgggtactgtgaactccgccgtagtttccatgggactatataattttgtggcctcgaatacaaattttactacatagttatctatcttaaagactataccatatcctcctgtagatatgtgataaaaatcgtcgtttataggataaaatcgtttatccttttgttggaaaaaggatgaattaatgtaatcattctcttctatctttagtagtgtttccttattaaaattcttaaaataatttaacaatctaactgacggagcccaattttggtgtaaatctaattgggacattatgttgttaaaatacaaacagtctcctaatataacagtatctgataatctatggggagacatccattgatattcaggggatgaatcattggcaacacccatttattgtacaaaaagccccaatttacaaacgaaagtccaggtttgatagagacaaacaattaactattttgtctctgtttttaatttctttggtaatgaaattattcacaatatcagtatcttctttatctaccagagattttactaacttgataaccttggctgtctcattcaatagggtagtaatatttgtatgtgtgatattgatatctttttgaattgtttcttttagaagtgattctttgatggtgccagcatacgaattacaataatgcagaaactcagttaacatgcaggaattatagtaagccaattccaattgttgcctgtattgtattagagtattaatatgcgcaatggtgtccttgcgtttctctgatagaatgcgagcagcgattttggcgttatcatttgacgatatttctggaatgacgaatcctgtttctactaactttttggtaggacaaagtgaaacaatcaagaagatagcttctcctcctatttgtggaagaaattgaactcctctagatgatctactgacgatagtatctccttgacagatattggaccgaattacagaagtacctggaatgtaaagccctgaaaccccctcattttttaagcagattgttgccgtaaatcctgcactgtgaccaagatagagagctcctttggtgaatccatctctatgtttcagtttaaccaagaaacagtcagctggtctaaaatttccatctctatctaatacagcatctaacttgatgtcaggaactatgaccggtttaatgttatatgtaacattgagtaaatccttaagttcataatcatcactgtcatcagttatgtacgatccaaacaatgtttctactggcatagtggatacgaagatgctatccatcagaatgtttccctgattagtattttctatatagctattcttctttaaacgattttccaaatcagtaactatgttcatttttttaggagtaggacgcctagccagtatggaagaggattttctagatcctctcttcaacatctttgatctcgatggaatgcaaaaccccatagtgaaacaaccaacgataaaaataatattgtttttcactttttataattttaccatctgactcatggattcattaatatctttataagagctactaacgtataattctttataactgaactgagatatatacaccggatctatggtttccataattgagtaaatgaatgctcggcaataactaatggcaaatgtatagaacaacgaaattatactagagttgttaaagttaatattttctatgagctgttccaataaattatttgttgtaactgcgttcaagtcataaatcatcttgatactatccagtaaaccgtgtttaagttctggaatattatcatcccattgtaaagcccctaattcgactatcgaatatcctgctctgatagcagtttcaatatcgacggacgtcaatactgtaataaaggtggtagtattgtcatcatcgtgataaactacgggaatatggtcgttagtaggtacggtgactttacacaacgcgatatataactttccttttgtaccatttttaacgtagttgggacgtcctgcagggtattgttttgaagaaatgatatcgagaacagatttgatacgatatttgttggattcctgattattcactataatataatctagacagatagatgattcgataaatagagaaggtatatcgttggtaggataatacatccccattccagtattctcggatactctattgatgacactagttaagaacatgtcttctattctagaaaacgaaaacatcctacatggactcattaaaacttctaacgctcctgattgtgtctcgaatgcctcgtacaaggatttcaaggatgccatagattctttgaccaacgatttagaattgcgtttagcatctgatttttttattaaatcgaatggtcggctctctggtttgctaccccaatgataacaatagtcttgtaaagataaaccgcaagaaaatttatacgcatccatccaaataaccctagcaccatcggatgatattaatgtattattatagattttccatccacaattattgggccagtatactgttagcaacggtatatcgaatagattactcatgtaacctactagaatgatagttcgtgtactagtcataatatctttaatccaatctaagaaatttaaaattagattttttacactgttaaagttaacaaaggtattacccggatacgtggatatcatatatggcattggtccattatcagtaatagctccataaactgatacggcgatggtttttatatgtgtttgatctaacgaggaagaaattcgcgcccacaattcatctctagatatgtatttaatatcaaacggtaacacatcaatttcgggacgcgtatatgtttctaaatttttaatccaaatataatgatgacctatatgccctattatcatactgtcaactatagtacacctagagaacttacgatacatctgtttcctataatcgttaaattttacaaatctataacatgctaaaccttttgacgacagccattcattaatttctgatatggaatctgtattctcgataccgtattgttctaaagccagtgctatatctccctgttcgtgggaacgctttcgtataatatcgatcaacggataatctgaagtttttggagaataatatgactcatgatctatttcgtccataaacaatctagacataggaattggaggcgatgatcttaattttgtgcaatgagtcgtcaatcctataacttctaatcttgtaatattcatcatcgacataatactatctatgttatcatcgtatattagtataccacggccttcttcatttcgtgccaaaataatatacagtcttaaataattacgcaatatctcaatagtttcataattgttagctgttttcatcaagatttgtaccctgtttaacatgatggcgttctatacgtctctattttcttttttttaaatttttaacgatttactgtggctagatacccaatctctctcaaatatttttttagcctcgcttacaagctgtttatctatactattaaaactgacgaatccgtgattttggtaatgggttccgtcgaaatttgccgaagtgatatgaacatattcgtcgtcgactatcaacaattttgtattattctgaatagtgaaaaccttcacagatagatcattttgaacacacaacgcgtctagacttctggcggttgccatagaatatacgtcgttcttatcccaattaccaactagaagtctgatcttaactcctctattaatggctgcttctataatggagttgtaaatgtcgggccaatagtagctattaccgtcgacacgtgtagtgggaactatggccaaatgttcaatatctatactagtcttagccgacttgagtttatcaataactacatcggtatctagatctctagaatatcccaataggtgttccggagaatcagtaaagaacactccacctataggattcttaatatgatacgcagtgctaactggcaaacaacaagccgcagagcataaattcaaccatgaattttttgcgctattaaaggctttaaaagtatcaaatcttctacgaagatctgtggccagcgggggataatcagaatatacacctaacgttttaatcgtatgtatagatcctccagtaaatgacgcgtttcctacataacatctttcatcatctgacacccaaaaacaaccgagtagtagtcccacattattttttttatctatattaacggttataaaatttatatccgggcagtgactttgtagctctcccagatttcttttccctcgttcatctagcaaaactattattttaatccctttttcagatgcctcttttagtttatcaaaaataagcgctcccctagtcgtactcagaggattacaacaaaaagatgctatgtatatatatttcttagctagagtgataatttcgttaaaacattcaaatgttgttaaatgatcggatctaaaatccatattttctggtagtgtttctaccagcctacattttgctcccgcaggtaccgatgcaaatggccacatttagttaacataaaaacttatacatcctgttctatcaacgattctagaatatcatcggctatatcgctaaaattttcatcaaagtcgacatcacaacctaactcagtcaatatattaagaagttccatgatgtcatcttcgtctatttctatatccgtatccattgtagattgttgaccgattatcgagtttaaatcattactaatactcaatccttcagaatacaatctgtgtttcattgtaaatttataggcggtgtatttaagttggtagattttcaattatgtatcaatatagcaacagtagttcttgctcctccttgattctagcatcctcttcattattttcttctacgtacataagcatgtccaatacgttagacaacacaccgacgatggcggccgccacagacacgaatatgactagaccgatgaccatttaaaaacccctctctagctttcacttaaactgtatcgattattcttttagaacatgtataatataaaaacattattctatttcgaatttaggcttccaaaaatttttcatccgtaaaccgataataatatatatagacttgttaatagtcggaataaatagattaatgcttaaactatcatcatctccacgattagagatacaatatttacattttttttgctgtttcgaaactttatcaatacacgttaatacaaacccaggaaggagatattgaaactgaggctgttgaaaatgaaacggtgaatacaataattcagataatgtaaaatcatgattccgtattctgatgatattagaactgctaatggatgtcgatggtatgtatctaggagtatctattttaacaaagcatcgatttgctaatatacaattatccttttgattaattgttattttattcatattcttaaaaggtttcatatttatcaattcttctacattaaaaatttccatttttaatttatgtagcccccgcaatactcctcattacgtttcattttttgtctataatatccattttgttcatctcggtacatagattatccaattgagaagcgcatttagtagttttgtacattttaagtttattgacgaatcgtcgaaaactagttatagttaacattttattatttgataccctgatattaatacccctgccgttactattatttataactgatgtaatccacgtaacattagaattaattatcgatagtaatgcatcgacgcttccaaaattgtctattataaactcaccgataatttttttattgcatgttttcatattcattaggattatcaaatctttaatcttactacgattgtatgcgttgatattgcaagacgtcattctaaaagacggaggatctccatcaaatgccagacaatcacgtacaaagtacatggaaataggttttgttctattgcgcatcatagatttatatagaacacccgtagaaatactaatttgttttactctataaaatactaatgcatctatttcatcgttttgtataacgtctttccaagtgtcaaattccaaatttttttcattgatagtaccaaattcttctatctctttaactacttgcatagataggtaattacagtgatgcctacatgccgttttttgaaactgaatagatgcgtctagaagcgatgctacgctagtcacaatcaccactttcatatttagaatatatgtatgtaaaaatatagtagaatttcattttgtttttttctatgctataaatgaattctcattttgcatctgctcatactccgttttatatcaataccaaagaaggaagatatctggttctaaaagccgttaaagtatgcgatgttagaactgtagaatgcgaaggaagtaaagcttcctgcgtactcaaagtagataaaccctcatcgcccgcgtgtgagagaagaccttcgtccccgtccagatgcgagagaatgaataaccctggaaaacaagttccgtttatgaggacggacatgctacaaaatatgttcgcggctaatcgcgacaacgtggcgtcgagacttttgaactaaaatacaattatatccttttcgatattaataaatccgtgtcgtccaggttttttatctctttcagtatgtgaatagataggtattttatctctattcatcatcgaatttaagagatccgataaacattgtttgtattctccagatgtcagcatctgatacaacaatatatgtgcacataaacctctggcacttatttcatgtaccttccccttatcactaaggagaatagtatttgagaaatatgtatacatgatattatcatgaattagatatacagaatttgtaacactctcgaaatcacacgatgtgtcggcgttaagatctaatatatcactcgataacacattttcatctagatacactagacattttttaaagctaaaatagtctttagtagtgacagtaactatgcgattattttcatcgatgatacatttcatcggcatattattacgcttaccatcaaagactataccatgtgtatatctaacgtattctagcatggttgccatacgcgcattaaacttttcaggatctttggatagatcttccaatctatctatttgagaaaacatttttatcatgttcaatagttgaaacgtcggatccactatatagatattatctataaagattttaggaactacgttcatggtatcctggcgaatattaaaactatcaatgatatgattatcgttttcatcttttatcaccatatagtttctaagatatgggattttacttaatataatattatttcccgtgataaattttattagaaaggccaaatctataagaaaagttctagaattagtctgaagaatatctatatcgccgtaccgtatatttggattaattagatatagagaatatgatccgtaacatatacaacttttattatggcgtctaagatattcttccatcaacttattaacatttttgactagggaagatacattatgacgtcccattacttttgccttgtctattactgcgacgttcatagaatttagcatatctcttgccaattcttccattgatgttacattataagaaattttagatgaaattacatttggagctttaatagtaagaactcctaatatgtccgtgtatgtggtcactaatacagattgtagttctataatcgtaaataatttacctatattatatgtttgagtctgtttagaaaagtagctaagtatacgatcttttatttctgatgcagatgtattaacatcggaaaaaaatctttttttattcttttttactaaagatacaaatatgtctttgttaaaaacagttattttttgaatatttctagcttgtaattttaacatatgatattcgttcacactaggtactctgcctaaataggtttctataatctttaatgtaatattaggaagagtattctgatcaggattcctattcattttgaggatttaaaactctgattattgtctaatatggtctctacgcaaactttttcacagagcgatagagtttttgataactcgtttttcttaagaaatataaaactactgtctccagagctcgctctatcttttattttatttaattcgatacaaactcctgatactggttcagaaagtaattcattaattttcagtcctttatagaagatatttaatatagataatacaaaattttcagttcttgatatcgatctgattgatcctagaactagatatattaataacgtgctcattaggcagtttatggcagcttgataattagatatagtatattccagttcatatttattagataccgcattgcccagattttgatattctatgaattcctctgaaaataaatccaaaataactaaacattctattttttgtggattagtgtactctcttccctctatcatgttcactactggtgtccacgatgataaatatctagagggaatataatatagtccataggatgccaatctagcaatgtcgaataactgtaatttgattcttcgttcttcattatgaattgattcttgaggtataaacctaacacaaattatattattagacttttcgtatgtaatgtctttcatgttataagtttttaatcctggaatagaatctattttaatgaggcttttaaacgcagagttctccaacgagtcaaagcataatactctgttgtttttcttatatacgatgttacgattttcttctttgaatggaataggtttttgaattagtttataattacaacataatagataaggaagtgtgcaaatagtacgcggaaaaaacataatagctcccctgttttcatccatggttttaagtaaatgatcactggcttctttagtcaatggatattcgaacattaaccgtttcatcatcattggacagaatccatatttcttaatgtaaagagtgatcaaatcattgtgtttattgtaccatcttgttgtaaatgtgtattcggttatcggatctgctcctttttctattaaagtatcgatgtcgatctcgtctaagaattcaactatatcgacatatttcatttgtatacacataaccattactaacgtagaatgtataggaagagatgtaacgggaacagggtttgttgattcgcaaactattctaatacataattcttctgttaatacgtcttgcacgtaatctattatagatgccaagatatctatataattattttgtaagatgatgttaactatgtgatctatataagtagtgtaataattcatgtatttcgatatatgttccaactctgtctttgtgatgtctagtttcgtaatatctatagcatcctcaaaaaatatattcgcatatattcccaagtcttcagttctatcttctaaaaaatcttcaacgtatggaatataataatctattttacctcttctgatatcattaatgatatagtttttgacactatcttctgtcaattgattcttattcactatatctaagaaacggatagcgtccctaggacgaactactgccattaatatctctattatagcttctggacataattcatctattataccagaattaatgggaactattccgtatctatctaacatagttttaagaaagtcagaatctaagacctgatgttcatatattggttcatacatgaaatgatctctattgatgatagtgactatttcattctctgaaaattggtaactcattctatatatgctttccttgttgatgaaggatagaatatactcaatagaatttgtaccaacaaactgttctcttatgaatcgtatatcatcatctgaaataatcatgtaaggcatacatttaacaattagagacttgtctcctgttatcaatatactattcttgtgataatttatgtgtgaggcaaatttgtccacgttctttaattttgttatagtagatatcaaatccaatggagctacagttcttggcttaaacagatatagtttttctggaacgaattctacaacattattataaaggactttgggtagataagtgggatgaaatcctattttaattaatgcgatagccttgtcctcgtgcagatatccaaacgcttttgtgatagtatggcattcattgtctagaaacgctctacgaatatctgtgacagatatcatctttagagaatatactagtcgcgttaatagtactacaatttgtattttttaatctatctcaataaaaaaattaatatgtatgattcaatgtataactaaactactaactgttattgataactagaatcagaatctaatgatgacgtaaccaagaagtttatctactgccaatttagctgcattatttttagcatctcgtttagattttccatctgccttatcgaatactcttccgtcgatgtctacacaggcataaaatgtaggagagttactaggccccactgattcaatacgaaaagaccaatctctcctagtaatttggcagtactcattaataacggtgacagggttagcacctttccaatcaataatttttttagccggaataacatcatcaaaagacttatgatcctctctcattgatttttcgcgggatacatcatctattatgacgtcagccatagcatcagcatccggcttatccgcctccgttgtcataaaccaacgaggaggaatatcgtcggagctgtacaccatagcactacgttgaagatcgtacagagctttattaacttctcgcttctccatattaagttgtctagttagttgtgcagcagtagctccttcgattccaatggttttaatagcctcacacacaatctctgcgttagaacgctcgtcgatatagattttagacatttttagagagaactaacgcaatcagtaataaaactaatttattttatcattttttttattcatcatcctctggtggttcgtcgtttctatcgaatgtagctctgattaacccgtcatctataggtgatgctggttctggagattctggaggagatggattattatctggaagaatctctgttatttccttgttttcatgtatcgattgcgttgtaacattaagattgcgaaatgctctaaatttgggaggcttaaagtgttgtttgcaatctctacacgcgtgtctaactagtggaggttcgtcagcggctctagtttgaatcatcatcggcgtagtattcctacttttacagttaggacacggtgtattgtatttctcgtcgagaacgttaaaataatcgttgtaactcacatcctttattttatctatattgtattctactcctttcttaatgcattttataccgaataagagatagcgaaggaattctttttcggtgccgctagtacccttaatcatatcacatagtgttttatattccaaatttgtggcaatagacggtttatttctatacgatagtttgtttctggaatcctttgagtattctataccaatattattctttgattcgaatttagtttcttcgatattagattttgtattacctatattcttgatgtagtactttgatgatttttccatggcccattctattaagtcttccaagttggcatcatccacatattgtgatagtaattctcggatatcagtagcggttaccgccattgatgtttgttcattggatgagtaactactaatgtatacattttccatttataacacttatgtattaactttgttcatttatattttttcattattatgttgatattaacaaaagtgaatatatatatgttaataattgtattgtggttatacggctacaattttataattagtgaaagtcagtgtccgatgatcaatgacgatagctttactctgaaaagaaagtatcaaatcgatagtgcggagtcaacaataaaaatggataagaagaggacaaagtttcagaatagagccaaaatggtaaaagaaataaatcagacaataagagcagcacaaactcattacgagacattgaaactaggatacataaaatttaagagaatgattaggactactactctagaagatatagcaccatctattccaaataatcagaaaacttataaactattctcggacatttcagccatcggcaaagcatcacggaatccaagtaagatggtatatgctctgctgctttacatgtttcccaatttgtttggagatgatcatagattcattcgttatagaatgcatccaatgagtaaaatcaaacacaagatcttctctcctttcaaacttaatcttattagaatattagtggaagaaagattctataataatgaatgcagatctaataaatggagaataattggaacacaagttgataaaatgttgatagctgaatctgataaatatacaatagatgcaaggtataacctaaaacccatgtatagaatcaagggaaaatctgaagaagataccctctttatcaaacagatggtagaacaatgtgtgacatcccaggaattggtggaaaaagtgttgaagatactgtttagagatttgttcaagagtggagaatacaaagcgtacagatacgatgatgatgtagaaaatggatttattggattggatacactaaaattaaacattgttcatgatatagttgaaccatgtatgcctgttcgtaggccagtggctaagatactgtgtaaagaaatggtaaataaatactttgagaatccgctacatattattggtaaaaatcttcaagagtgcattgactttgttagtgaataggcatttcatctttctccaatactaattcaaattgttaaattaataatggatagtataaatagttattagtgataaaatagtaaaaataattattagaataagagtgtagtatcatagataactctcttctataaaaatggattttattcgtagaaagtatcttatatacacagtagaaaataatatagattttttaaaggatgatacattaagtaaagtaaacaattttaccctcaatcatgtactagctctcaagtatctagttagcaattttcctcaacatgttattactaaggatgtattagctaataccaatttttttgttttcatacatatggtacgatgttgtaaagtgtacgaagcggttttacgacacgcatttgatgcacccacgttgtacgttaaagcattgactaagaattatttatcgtttagtaacacaatacaatcgtacaaggaaaccgtgcataaactaacacaagatgaaaaatttttagaggttgccaaatacatggacgaattaggagaacttataggcgtaaattatgacttagttcttaatccattatttcacggaggggaacccatcaaagatatggaaatcatttttttaaaactgtttaagaaaacagacttcaaagttgttaaaaaattaagtgttataagattacttatttgggcttacctaagcaagaaagatacaggcatagagtttgcggataatgatagacaagatatatatactctatttcaacaaactggtagaatcgtccatagcaatctaacagaaacgtttagagattatatctttcccggagataagactagctattgggtgtggttaaacgaaagtatagctaatgatgcggatattgttcttaatagacacgccattaccatgtatgataaaattcttagttatatatactctgagataaaacaaggacgcgttaataaaaacatgcttaagttagtttatatctttgagcctgaaaaagatatcagagaacttctgctagaaatcatatatgatattcctggagatatcctatctattattgatgcaaaaaacgacgattggaaaaaatattttattagtttttataaagctaattttattaacggtaatacatttattagtgatagaacgtttaacgaggacttattcagagttgttgttcaaatagatcccgaatatttcgataatgaacgaattatgtctttattctctacgagtgctgcggacattaaacgatttgatgagttagatattaataacagttatatatctaatataatttatgaggtgaacgatatcacattagatacaatggatgatatgaagaagtgtcaaatctttaacgaggatacgtcgtattatgttaaggaatacaatacatacctgtttttgcacgagtcggatcccatggtcatagagaacggaatactaaagaaactgtcatctataaaatccaagagtagacggctgaacttgtttagcaaaaacattttaaaatattatttagacggacaattggctcgtctaggtcttgtgttagatgattataaaggagacttgttagttaaaatgataaaccatcttaagtctgtggaggatgtatccgcattcgttcgattttctacagataaaaaccctagtattcttccatcgctaatcaaaactattttagctagttataatatttccatcatcgtcttatttcaaaggtttttaagagataatctatatcatgtagaagaattcttggataaaagcatccatctaaccaagacggataagaaatatatacttcaattgataagacacggtagatcatagaacagaccaaatatattattaataatttgtatatacatagatataattatcacatattaaaaattcacacatttttgataaatgggaactgctgcaacaattcagactcccaccaaattaatgaataaagaaaatgcagaaatgattttggaaaaaattgttgatcatatagttatgtatattagtgacgaatcaagtgattcagaaaataatcctgaatatattgattttcgtaacagatacgaagactatagatctctcattataaaaagtgatcacgagtttgtaaagctatgtaaaaatcatgcagagaaaagttctccagaaacgcaacaaatgattatcaaacacatatacgaacaatatcttattccagtatctgaagtactattaaaacctataatgtccatgggtgacataattacatataacggatgtaaagacaatgaatggatgctagaacaactctctaccctaaactttaacaatctccgcacatggaactcatgtagcataggcaatgtaacgcgtctgttttatacattttttagttatctgatgaaagataaactaaatatataagtataatcccattctaatactttaacctgatgtattagcatcttattagaatattaacctaactaaaagacataacataaaaactcattacatagttgataaaaagcggtaggatataaatattatggctgccaccgttccgcgttttgacgacgtgtacaaaaatgcacaaagaagaattctagatcaagaaacattttttagtagaggtctaagtagaccgttaatgaaaaacacatatctatttgataattacgcgtatggatggataccagaaactgcaatttggagtagtagatacgcaaacttagatgcaagtgactattatcccatttcgttgggattacttaaaaagttcgagtttctcatgtctctatataaaggtcctattccagtatacgaagaaaaagtaaatactgaattcattgctaatggatcgttctctggtagatacgtatcatatcttcgaaagttttctgctcttccaacaaacgagtttattagttttttgttactgacttccattccaatctataatatcttgttctggtttaaaaatactcagtttgatattactaaacacacattattcagatacgtctatacagataatgccaaacacctggcgttggctaggtatatgcatcaaacaggagactataagcctttgtttagtcgtctcaaagagaattatatatttaccggtcccgttccaataggtatcaaagatataaatcaccctaatcttagtagagcaagaagtccatccgattatgagacattagctaatattagtactatattgtactttaccaagtatgatccggtattaatgtttttattgttttacgtacctgggtattcaattactacaaaaattactccagccgtagaatatctaatggataaactgaatctaacaaagagcgacgtacaactgttgtaaattattttatgcttcgtaaaatgtaggttttgaaccaaacattctttcaaagaatgagatgcataaaactttattatccaatagattgactatttcggacgtcaatcgtttaaagtaaacttcgtaaaatattctttgatcactgccgagtttaaaacttctatcgataattgtttcatatgttttaatatttacaagttttttggtccatggtacattagccggacaaatatatgcaaaataatatcgttctccaagttctatagtttctggattatttttattatattcagtaaccaaatacatattagggttatctgcggatttataatttgagtgatgcattcgactcaacataaataattctagaggagacgatctactatcaaattcggatcgtaaatctgtttctaaagaacggagaatatctatacatacctgattagaattcatccgtccttcagacaacatctcagacagtctggtcttgtatgtcttaatcatattcttatgaaacttggaaacatctcttctagtttcactagtacctttattaattctctcaggtacagattttgaattcgacgatgccgagtatttcatcgttgtatatttcttcttcgattgcataatcagattcttatataccgcctcaaactctattttaaaattattaaacaatactctattattaatcagtcgttctaactcctttgctatttctatggacttatctacatcttgactgtctatctctgtaaacacggagtcggtatctccatacacgctacgaaaacgaaatctgtaatctataggcaacgatgttttcacaatcggattaatatctctatcgtccatataaaatggattacttaatggattggcaaaccgtaacataccgttagataactctgctccatttagtaccgattctagatacaagatcattctacgtcctatggatgtgcaactcttagccgaagcgtatgagtatagagcactatttctaaatcccatcagaccatatactgagttggctactatcttgtacgtatattgcatggaatcatagatggccttttcagttgaactggtagcctgttttaacatctttttatatctggctctctctgccaaaaatgttcttaatagtctaggaatggttccttctatcgatctatcgaaaattgctatttcagagatgaggttcggtagtctaggttcacaatgaaccgtaatatatctaggaggtggatatttctgaagcaagagctgattatttatttcttcttccaatctattggtactaacaacgacaccgactaatgtttccggagatagatttccaaagatacacacattaggatacagactgttataatcaaagattaatacattattactaaacattttttgttttggagcaaataccttaccgccttcataaggaaacttttgttttgtttctgatctaactaagatagttttagtttccaacaatagctttaacagtggacccttgatgactgtactcgctctatattcgaataccatggattgaggaagcacatatgttgacgcacccgcgtctgtttttgtttctactccataatactcccacaaatactgacacaaacaagcatcatgaatacagtatctagccatatctaaagctatgtttagattataatccttatacatctgagctaaatcaacgtcatcctttccgaaagataatttatatgtatcattaggtaaagtaggacataatagtacgactttaaatccattttcccaaatatctttacgaattactttacatataatatcctcatcaacagtcacataattacctgtggttaaaacctttgcaaatgcagcggctttgcctttcgcgtccgtagtatcgtcaccgatgaacgtcatttctctaactcctctatttaatactttacccatgcaactgaacgcgttcttggatatagaatccaatttgtacgaatccaatttttcagatttttgaatgaatgaatatagatcgaaaaatatagttccattattgttattaacgtgaaacgtagtattggccatgccgcctactcccttatgactagactgatttctctcataaatacagagatgtacagcttcctttttgtccggagatctaaagataatcttctctcctgttaataactctagacgattagtaatatatctcagatcaaagttatgtccgttaaaggtaacgacatagtcgaacgttagttccaacaattgtttagctattcgtaacaaaactatttcagaacataaaactagttctcgttcgtaatccatttccattagtgactgtatcctcaaacatcctctatcgacggcttcttgtatttcctgttccgttaacatctcttcattaatgagcgtaaacaataatcgtttaccacttaaatcgatataacagtaacttgtatgcgagattgggttaataaatacagaaggaaacttcttatcgaagtgacactctatatctagaaataagtacgatcttgggatatcgaatctaggtatttttttagcgaaacagttacgtggatcgtcacaatgataacatccattgttaatctttgtcaaatattgctcgtccaacgagtaacatccgtctggagatatcccgttagaaatataaaaccaactaatattgagaaattcatccatggtggcattttgtatgctgcgtttctttggctcttctatcaaccacatatctgcgacggagcattttctatctttaatatctagattataacttattgtctcgtcaatgtctatagttctcatctttcccaacggcctcgcattaaatggaggaggagacaatgactgatatatttcgtccgtcactacgtaataaaagtaatgaggaaatcgtataaatacggtctcaccatttcgacatctggatttcagatataaaaatctgttttcaccgtgactttcaaaccaattaatgcaccgaacatccatttatagaatttagaaatatattttcatttaaatgaatcccaaacattggggaagagccgtatggaccattatttttatagtactttcgcaagcgggtttagacggcaacatagaagcgtgtaaacgaaaactatatactatagttagcactcttccatgtcctgcatgtagacggcacgcgactatcgctatagaggacaataatgtcatgtctagcgatgatctgaattatatttattattttttcatcagattatttaacaatttggcatctgatcccaaatacgcgatcgatgtgacaaaggttaaccctttataaacttaacccattataaaacttatgattagtcacgactgaaataaccgcgtgattattttttggtataattctacacggcatggtttctgtgactatgaattcaacccccgttacattagtgaaatctttaacaaacagcaagggttcgtcaaagacataaaactcattgtttacaatcgaaatagaccccctatcacacttaaaataaaaaatatccttatcctttaccaccaaataaaattctgattggtcaatgtgaatgtattcacttaacagttccacaaatttatttattaactccgaggcacatacatcgtcggtattttttatggcaaactttactcttccagcatccgtttctaaaaaaatattaacgagttccatttatatcatccaatattattgaaatgacgttgatggacaaatgatacaaataagaaggtacggtacctttgtccaccatctcctccaattcatgctctattttgtcattaactttaatgtatgaaaacagtacgccacatgcttccatgacagtgtgtaacactttggatacaaaatgtttgacattagtataattgttcaagactgtcaatctataatagatagtagctataatatattctatgatggtattgaagaagatgacaaccttggcatattgatcatttaacacagacatggtatcaacagatagcttgaatgaaagagaatcagtaattggaataagcgtcttctcgatggagtgtccgtataccaacatgtctgatattttgatgtattccattaaattatttagttttttctttttattctcgttaaacagcatttctgtcaacggaccccaacatcgttgaccgattaagttttgattgatttttccgtgtaaggcgtatctagtcagatcgtatagcctatccaataatccatcgtctgtgtgtagatcacatcgtacactttttaattctctatagaagagcgacagacatctggagcaattacagacagcaatttctttattctctacagatgtaagatacttgaagacattcctatgatgatgcagaattttggataacacggtattgatggtatctgttaccataattcctttgatggctgatagtgtcagagcacaagatttccaatctttgacaatttttagcaccattatctttgttttgatatctatatcagacagcatggtgcgtctgacaacacaaggattaagacggaaagatgaaatgattctctcaacatcttcaatggataccttgctattttttctggcattatctatatgtgcgagaatatcctctagagaatcagtatcctttttgatgatagtggatctcaatgacatgggacgtctaaaccttcttattctatcaccagattgcatggtgatttgtcttctttcttttatcataatgtaatctctaaattcatcggcaaattgtctatatctaaaatcataatatgagatgtttacctctacaaatatctgttcgtccaatgttagagtatttacatcagttttgtattccaaattaaacatggcaacggatttaattttatattcctctattaagtcctcgtcgataataacagaatgtagataatcatttaatccatcgtacatggttggaagatgctcgttgacaaaatctttaattgtcttgatgaaggtgggactatatctaacatcttgattaataaaatttataacattgtccataggatactttgtaactagttttatacacatctcttcatcggtaagtttagacagaatatcgtgaacaggtggtatattatattcatcagatatacgaagaacaatgtccaaatctatattgtttaatatattatatagatgtagtgtagctcctacaggaatatctttaactaagtcaatgatttcatcaaccgttagatctattttaaagttaatcatataggcattgatttttaaaaggtatgtagccttgactacattctcattaattaaccattccaagtcactgtgtgtaagaagattatattctatcataagcttgactacatttggtcccgataccattaaagaattcttatgatataaggaaacagattttaggtactcatctactctacaagaattttggagagccttaacgatatcagtgacgtttattatttcaggaggaaaaaacctaacattgagaatatcggaattaatagcttccagatacagtgattttggcaatagtccgtgtaatccataatccagtaacacgagctggtgcttgctagacaccttttcaatgtttaatttttttgaaataagctttgataaagccttcctcgcaaattccggatacatgaacatgtcggcgacatgattaagtattgttttttcattatttttatattttctcaacaagttctcaataccccaatagatgatagaatatcacccaatgcgtccatgttgtctatttccaacaggtcgctatatccaccaatagaagttttcccaaaaaagattctaggaacagttctaccaccagtaatttgttcaaaatagtcacgcaattcattttcgggtttaaattctttaatatcgacaatttcatacgctcctcttttgaaactaaacttatttagaatatccagtgcatttctacaaaaaggacatgtatacttgacaaaaattgtcactttgttattggccaacctttgttgtacaaattcctcggccattttaatatttaagtgatataaaactatctcgacttatttaactctttagtcgagatatatggacgcagatagctatatgatagccaactacagaaggcaaacgctataaaaaacataattacgacgagcatatttataaatatttttattcagcattacttgatatagtaatattaggcacagtcaaacattcaaccactctcgatacattaactctctcattttctttaacaaattctgcaatatcttcgtaaaaagattcttgaaactttttagaatatctatcgactctagatgaaatagcgttcgtcaacatactatgttttgtatacataaaggcgcccattttaacagtttctagtgacaaaatgctagcgatcctaggatcctttagaatcacatagattgacgattcgtctctcttagtaactctagtaaaataatcatacaatctagtacgcgaaataatattatccttgacttgaggagatctaaacaatctagttttgagaacatcgataagttcatcgggaatgacatacatactatctttaatagaactcttttcatccagttgaatggattcgtccttaaccaactgattaatgagatcttctattttatcattttccagatgatatgtatgtccattaaagttaaattgtgtagcgcttctttttagtctagcagccaatactttaacatcactaatatcgatatacaaaggagatgatttatctatggtattaagaattcgtttttcgacatctgtcaaaaccaattcctttttgcctgtatcatccagttttccatcctttgtaaagaaattattttctactagactattaataagactgataaggattcctccataattgcacaatccaaactttttcacaaaactagactttacaagatctacaggaatgcgtacttcaggtttcttagcttgtgattttttcttttgtggacattttcttgtgaccaactcatctaccatttcattgattttagcagtgaaataagctttcaatgcacgggcactgatactattgaaaacgagttgatcttcaaattccgccatttaagttcaccaaacaacttttaaatacaaatatatcaatagtagtagaataagaactataaaaaaaataataattaaccaataccaaccccaacaaccggtattattagttgatgtgactgttttctcatcacttagaacagatttaacaatttctataaagtctgtcaaatcatcttccggagaccccataaatacaccaaatatagcggcgtacaacttatccatttatacattgaatattggcttttctttatcgctatcttcatcatattcatcatcaatatcaacaagtcccagattacgagccagatcttcttctacattttcagtcattgatacacgttcactatctccagagagtccgataacgttagccaccacttctctatcaatgattagtttcttgagtgcgaatgtaatttttgtttccgttccggatctatagaaaactacaggtgtgataattgccttggccaattgtctttctcttttactgagtgattctagttcaccttctatagatctgagaatggatgattctccagtcgaaacatattctaccatggctccgtttaatttgttgatgaagatggattcatccttaaatgttttctctgtaatagtttccaccgaaagactatgcaaagaatttggaatgcgttccttgtgcttaatgtttccatagacggcttctagaagttgatacaacataggactagccgcggtaacttttatttttagaaagtatccatcgcttctatcttgtttagatttatttttataaagtttagtctctccttccaacataataaaagtggaagtcatttgactagataaactatcagtaagttttatagagatagacgaacaattagcgtattgagaagcatttagtgtaacgtattcgatacattttgcattagatttactaatcgattttgcatactctataacacccgcacaagtctgtagagaatcgctagatgcagtaggtcttggtgaagtttcaactctcttcttgattaccttactcatgattaaacctaaataattgtactttgtaatataatgatatatattttcactttatctcatttgagaataaaaatgtttttgtttaaccactgcatgatgtacagatttcggaatcacaaaccaccggtggttttattttatccttgtccaatgtgaattgaatgggagcggatgcgggtttcgtacgtagatagtacattcccgtttttagaccgagactccatccgtaaaaatgcatactcgttagtttggaataactcggatctgctatatggatattcatagattgactttgatcgatgaaggctcccctgtctgcagccatttttatgatcgtcttttgtggaatttcccaaatagttttataaactcgcttaatatcttctggaaggtttgtattctgaatggatccaccatctgccataatcctattcttgatctcatcattccataattttctctcggttaaaactctaaggagatgcggattaactacttgaaattctccagacaatactctccgagtgtaaatattactggtatacggttccaccgactcattatttcccaaaatttgagcagttgatgcagtcggcataggtgccaccaataaactatttctaagaccgtatgttctgattttatcttttagaggttcccaattccaaagatccgacggtacaacattccaaagatcatattgtagaataccgttactggcgtacgatcctacatatgtatcgtatggtccttccttctcagctagttcacaactcgcctctaatgcaccgtaataaatggtttcgaagatcttcttatttagatcttgtgcttccaggctatcaaatggataatttaagagaataaacgcgtccgctaatccttgaacaccaataccgataggtctatgtctcttattagagatttcagcttctggaataggataataattaatatctataattttattgagatttctgacaattactttgaccacatccttcagtttgagaaaatcaaatcgcccatctattacaaacatgttcaaggcaacagatgccagattacaaacggctacctcattagcatccgcatattgtattatctcagtgcaaagattactacacttgatagttcctaaattttgttgattactctttttgttacacgcatccttataaagaatgaatggagtaccagtttcaatctgagattctataatcgctttccagacgactcgagcctttattatagatttgtatctcctttctctttcgtatagtgtatacaatcgttcgaactcgtctccccaaacattgtccaatccaggacattcatccggacacatcaacgaccactctccgtcatccttcactcgtttcataaagagatcaggaatccaaagagctataaatagatctctggttctatgttcctcgtttcctgtattctttttaagatcgaggaacgccataatatcagaatgccacggttccaagtatatggccataactccaggccgtttgtttcctccctgatctatgtatctagcggtgttattataaactctcaacattggaataataccgtttgatataccattggtaccggagatatagcttccactggcacgaatattactaattgatagacctattccccctgccattttagagattaatgcgcatcgttttaacgtgtcatagataccctctatgctatcatcgatcatgttaagtagaaaacagctagacatttggtgacgactagttcccgcattaaataaggtaggagaagcgtgcgtaaaccatttttcagaaagtagattgtacgtctcaatagctgagtctatatcccattgatgaattcctactgcgacacgcattaacatgtgctgaggtctttcaacgatcttgttgtttattttcaacaagtaggatttttccaaagttttaaaaccaaaatagttgtatgaaaagtctcgttcgtaaataataaccgagttgagtttatccttatatttgttaactatatccatggtgatacttgaaataatcggagaatgtttcccatttttaggattaacatagttgaataaatcctccatcacttcactaaatagtttttttgtttccttgtgtagatttgatacggctattctggcggctagaatggcataatccggatgttgtgtagtacaagtggctgctatttcggctgccagagtgtccaattctaccgttgttactccattatatattccttgaataaccttcatagctattttaataggatctatatgatccgtgtttaagccataacataattttctaatacgagacgtgattttatcaaacatgacattttccttgtatccatttcgtttaatgacaaacatttttgttggtgtaataaaaaaattatttaacttttcattaatagggatttgacgtacgtagcgtacaaaatgattgttcctggtatatagataaagagtcctatatatttgaaaatcgttacggctcgattaaactttaatgattgcatagtgaatatatcattaggatttaactccttgactatcagggcggcaccagaaattaccatcaaaagcattaatacagttatgcctatcgcagttagaacggttatagcatccaccatttatatctaaaaattagatcaaagaatatgtgacaaagtcctagttgtatattgagaattgacaaaacaatgtttcttacatattttttttttattagtaaccgacttaatagtaggaactggaaaactagacttgattattctataagtatagatacccttccaaataatattctctttgataaaagttccagaaaatgtagaattttttaaaaagttatcttttgctattaccaagattgtgtttagacgcttattattaatatgagtgatgaaatccacaccgcctctagatatcgcctttatttccacattagatggtaaatccaatagtgaaactatctttttaggaatgtatggactcgcgtttagaggagtgaacgtcttgggcgtcggaaaggatgattcgtcaaacgaataaacaatttcacaaatggatgttaatgtattagtaggaaattttttgacgctagtggaattgaaaattctaatggatgatgttctacctatttcatccgataacatgttaatttccgacaccaacggttttaatatttcgatgatatacggtagtctctctttcggacttatatagcttattccacaatacgagtcattatatactccaaaaaacaaaataactagtataaaatctgtatcgaatgggaaaaacgaaattatcgacataggtatagaatccggaacattgaacgtattaatacttaattctttttctgtggtaagtaccgataggttattgacattgtatggttttaaatattctataacttgagacttgatagatattagtgatgaattgaaaattatttttatcaccacgtgtgtttcaggatcatcgtcgacgcccgtcaaccaaccgaacggagtaaaataaatatcattaatatatgctctagatattagtatttttatcaatcctttgattatcatcttctcgtaggcgaatgattccatgatcaagagtgatttaagaacatcctccggagtattaatgggcttagtaaacagtccatcgttgcaataataaaagttatccaagttaaaggatattatgcattcgtttaaagatatcacctcatctgacggagacaattttttggtaggttttagagactttgaagctacttgtttaacaaagttattcatcgtcgtttactattctatttaattttgtagttaatttatcacatatcacattaattgactttttggtccatttttccatacgtttatattcttttaatcctgcgttatccgtttccgttatatccagtgatagatcgtgcaggttaaatagaatgctcttaaataatgtcatttttttatccgctaaaaatttaaagaatgtataaacttttttcaaagatttaaaacttttaggtggtgtcctagtacacaatatcataaacaaactaataaacatcccgcattcagattccaacagctgattaacttccacattaatacagcctattttcgctccaaatgtacattcgaaaaatctgaataaaacatcaatgtcgcaatttgtattatccaatacagaatgtttgtgattcgtgttaaaaccatcggagaaggaatagaaataaaaattattatagtggtggaattcagttggaatattgcctccggagtcataaaaggatactaaacattgttttttatcataaattacacatttccaatgagacaaataacaaaatccaaacattacaaatctagaggtagaacttttaattttgtctttaagtatatacgataagatatgtttattcataaacgcgtcaaatttttcatgaatcgctaaggagtttaagaatctcatgtcaaattgtcctatataatccacttcggatccataagcaaactgagagactaagttcttaatacttcgattgctcatccaggctcctctctcaggctctattttcatcttgacgacctttggattttcaccagtatgtattccttttttttctagacactaaataaaatatttaaaatataatattaatgtactaaaacttatatattattaatttatctaactaaagttagtaaattatatatataattttataattaatttaattttactaattttatttagtgtctagaaaaaaa

SEQ ID NO: 17 - DNA, 68308 bp, Artificial Sequence
  sVAC fragment 2
tttttttctagacactaaataaaatatttaaaatataatattaatgtactaaaacttatatattattaatttatctaactaaagttagtaaattatatatataattttataattaatttaattttactaattttatttagtgtctagaaaaaaaccccctgccattttagagattaatgcgcatcgttttaacgtgtcatagataccctctatgctatcatcgatcatgttaagtagaaaacagctagacatttggtgacgactagttcccgcattaaataaggtaggagaagcgtgcgtaaaccatttttcagaaagtagattgtacgtctcaatagctgagtctatatcccattgatgaattcctactgcgacacgcattaacatgtgctgaggtctttcaacgatcttgttgtttattttcaacaagtaggatttttccaaagttttaaaaccaaaatagttgtatgaaaagtctcgttcgtaaataataaccgagttgagtttatccttatatttgttaactatatccatggtgatacttgaaataatcggagaatgtttcccatttttaggattaacatagttgaataaatcctccatcacttcactaaatagtttttttgtttccttgtgtagatttgatacggctattctggcggctagaatggcataatccggatgttgtgtagtacaagtggctgctatttcggctgccagagtgtccaattctaccgttgttactccattatatattccttgaataaccttcatagctattttaataggatctatatgatccgtgtttaagccataacataattttctaatacgagacgtgattttatcaaacatgacattttccttgtatccatttcgtttaatgacaaacatttttgttggtgtaataaaaaaattatttaacttttcattaatagggatttgacgtacgtagcgtacaaaatgattgttcctggtatatagataaagagtcctatatatttgaaaatcgttacggctcgattaaactttaatgattgcatagtgaatatatcattaggatttaactccttgactatcagggcggcaccagaaattaccatcaaaagcattaatacagttatgcctatcgcagttagaacggttatagcatccaccatttatatctaaaaattagatcaaagaatatgtgacaaagtcctagttgtatattgagaattgacaaaacaatgtttcttacatattttttttttattagtaaccgacttaatagtaggaactggaaaactagacttgattattctataagtatagatacccttccaaataatattctctttgataaaagttccagaaaatgtagaattttttaaaaagttatcttttgctattaccaagattgtgtttagacgcttattattaatatgagtgatgaaatccacaccgcctctagatatcgcctttatttccacattagatggtaaatccaatagtgaaactatctttttaggaatgtatggactcgcgtttagaggagtgaacgtcttgggcgtcggaaaggatgattcgtcaaacgaataaacaatttcacaaatggatgttaatgtattagtaggaaattttttgacgctagtggaattgaaaattctaatggatgatgttctacctatttcatccgataacatgttaatttccgacaccaacggttttaatatttcgatgatatacggtagtctctctttcggacttatatagcttattccacaatacgagtcattatatactccaaaaaacaaaataactagtataaaatctgtatcgaatgggaaaaacgaaattatcgacataggtatagaatccggaacattgaacgtattaatacttaattctttttctgtggtaagtaccgataggttattgacattgtatggttttaaatattctataacttgagacttgatagatattagtgatgaattgaaaattatttttatcaccacgtgtgtttcaggatcatcgtcgacgcccgtcaaccaaccgaacggagtaaaataaatatcattaatatatgctctagatattagtatttttatcaatcctttgattatcatcttctcgtaggcgaatgattccatgatcaagagtgatttaagaacatcctccggagtattaatgggcttagtaaacagtccatcgttgcaataataaaagttatccaagttaaaggatattatgcattcgtttaaagatatcacctcatctgacggagacaattttttggtaggttttagagactttgaagctacttgtttaacaaagttattcatcgtcgtttactattctatttaattttgtagttaatttatcacatatcacattaattgactttttggtccatttttccatacgtttatattcttttaatcctgcgttatccgtttccgttatatccagtgatagatcgtgcaggttaaatagaatgctcttaaataatgtcatttttttatccgctaaaaatttaaagaatgtataaacttttttcaaagatttaaaacttttaggtggtgtcctagtacacaatatcataaacaaactaataaacatcccgcattcagattccaacagctgattaacttccacattaatacagcctattttcgctccaaatgtacattcgaaaaatctgaataaaacatcaatgtcgcaatttgtattatccaatacagaatgtttgtgattcgtgttaaaaccatcggagaaggaatagaaataaaaattattatagtggtggaattcagttggaatattgcctccggagtcataaaaggatactaaacattgttttttatcataaattacacatttccaatgagacaaataacaaaatccaaacattacaaatctagaggtagaacttttaattttgtctttaagtatatacgataagatatgtttattcataaacgcgtcaaatttttcatgaatcgctaaggagtttaagaatctcatgtcaaattgtcctatataatccacttcggatccataagcaaactgagagactaagttcttaatacttcgattgctcatccaggctcctctctcaggctctattttcatcttgacgacctttggattttcaccagtatgtattcctttacgtgataaatcatcgattttcaaatccatttgtgagaagtctatcgccttagatactttttcccgtagtcgaggtttaaagaaatacgctaacggtatactagtaggtaactcaaaaacatcatatatagaatggtaacgcgtctttaactcgtcggttaactctttcttttgatcgagttcgtcgctactattgggtctgctcaggtgccccgactctactagttccaacatcataccgataggaatacaagacactttgccggcggttgtagatttatcatatttttccactacatatccgttacaatttgttaaaaatttagatacatctatattgctacataatccagctagtgaatatatatgacataataaattggtaaatcctagttctggtattttactaattactaaatctgtatatctttccatttatcatggaaaagaatttaccagatatcttcttttttccaaactgcgttaatgtattctcttacaaatattcacaagatgaattcagtaatatgagtaaaacggaacgtgatagtttctcattggccgtgtttccagttataaaacatagatggcataacgcacacgttgtaaaacataaaggaatatacaaagttagtacagaagcacgtggaaaaaaagtatctcctccatcactaggaaaacccgcacacataaacctaaccgcgaagcaatatatatacagtgaacacacaataagctttgaatgttatagttttctaaaatgtataacaaatacagaaatcaattcgttcgatgagtatatattaagaggactattagaagctggtaatagtttacagatattttccaattccgtaggtaaacgaacagatactataggtgtactagggaataagtatccatttagcaaaattccattggcctcattaactcctaaagcacaacgagagatattttcagcgtggatttctcatagacctgtagttttaactggaggaactggagtgggtaagacgtcacaggtacccaagttattgctttggtttaattatttatttggtggattctctactctagataaaatcactaactttcacgaaagaccagtcattctatctcttcctaggatagctttagttagattgcatagcaataccattttaaaatcattgggatttaaggtactagatggatctcctatttctttacggtacggatctataccggaagaattaataaacaaacaaccaaaaaaatatggaattgtattttctacccataagttatctctaacaaaactatttagttatggcactcttattatagacgaagttcatgagcatgatcaaataggagatattattatagcagtagcgagaaagcatcatacgaaaatagattctatgtttttaatgactgccacgttagaggatgaccgagaacggctaaaagtatttttacctaatcccgcatttatacatattcctggagatacactgtttaaaattagcgaggtatttattcataataagataaatccatcttccagaatggcatacatagaagaagaaaagagaaatttagttactgctatacagatgtatactcctcctgatggatcatccggtatagtctttgtggcatccgttgcacagtgtcacgaatataaatcatatttagaaaaaagattaccgtatgatatgtatattattcatggtaaggtcttagatatagacgaaatattagaaaaagtgtattcatcacctaatgtatcgataattatttctactccttatttggaatccagcgttactatacgcaatgttacacacatttatgatatgggtaaagtttttgtccccgctccttttggaggatcgcaagaatttatttctaaatctatgagagatcaacgaaaaggaagagtaggaagagttaatcctggtacatacgtctatttctatgatctgtcttatatgaagtctatacagcgaatagattcagaatttctacataattatatattgtacgctaataagtttaatctaacactccccgaagatttgtttataatccctacaaatttggatattctatggcgtacaaaggaatatatagactcgttcgatattagtacagaaacatggaataaattattatccaattattatatgaagatgatagagtatgctaaactttatgtactaagtcctattctcgctgaggagttggataactttgagaggacgggagaattaactagtattgtacgagaagccattttatctctaaatttacgaattaagattttaaattttaaacataaagatgatgatacgtatatacacttttgtaaaatattattcggtgtctataacggaacaaacgctactatatattatcatagacctctaacgggatatatgaatatgatttcagatactatatttgttcctgtagataataactaaaaatcaaactctaatgaccacatctttttttagagatgaaaaattttctacatctccttttgtagacacgactaaacattttgcaaaaaaaagtttattagtgtttagataatcgtatacttcatcagtgtagatagtaaatgtgaacaaataaaaggtattcttactcaatagattggtaaattccatagaatatattaatcctttcttcttgagatcccacatcatttcaaccagagacgttttatccaatgatttacctcgtactataccacatacaaaactagattttgcagtgacgtcgtacctggtattcctaccaaacaaaattttacttttagttcttttagaaaattctaaggtagaatctctatttgccaatatgtcatctatggaattaccactagcaaaaaatgatagaaatatatattgatacatcgcagctggttttgatctactatactttaaaaacgaatcagattccataattgcctgtatatcatcagctgaaaaactatgttttacacgtattccttcggcatttctttttaatgatatatcttgtttagacaatgataaagttatcatgtccatgagagacgcgtctccgtatcgtataaatatttcattagatgttagacgcttcattaggggtatacttctataaggtttcttaatcagtccatcattggttgcgtcaagaactactatcggatgttgttgggtatctctagtgttacacatggccttactaaagtttgggtaaataactatgatatctctattaattatagatgcatatatttcattcgtcaaggatattagtatcgacttgctatcgtcattaatacgtgtaatgtaatcatataaatcatgcgatagccaaggaaaattcaaatagatgttcatcatataatcgtcgctataattcatattaatacgttgacattgactaatttgtaatatagcctcgccacgaagaaagctctcgtattcagtttcatcgataaaggataccgttaaatataactggttgccgatagtctcatagtctattaagtggtaagtttcgtacaaatacagaatccctaaaatattatctaatgttggattaatctttaccataactgtataaaatggagacggagtcataactattttaccgtttgtacttactggaatagacgaaggaataatctccggacatgctggtaaagacccaaatgtctgtttgaagaaatccaatgttccaggtcctaatctcttaacaaaaattacgatattcgatcccgatatcctttgcattctatttaccagcatatcacgaactatattaagattatctatcatgtctattctcccaccgttatataaatcgcctccgctaagaaacgttagtatatccatacaatggaatacttcatttctaaaatagtattcgttttctaattctttaatgtgaaatcgtatactagaaagggaaaaattatctttgagttttccgttagaaaagaaccacgaaactaatgttctgattgcgtccgattccgttgctgaattaatggatttacaccaaaaactcatataacttctagatgtagaagcattcgctaaaaaattagtagaatcaaaggatataagtagatgttccaacaagtgagcaattcccaagatttcatctatatcattctcgaatccgaaattagaaattcccaagtagatatcctttttcatccgatcgttgatgaaaatacgaactttattcggtaagacaatcatttactaaggagtaaaataggaagtaatgttcgtatgtcgttatcatcgtataaattaaaggtgtgttttttaccattaagtgacattataattttaccaatattggaattataatataggtgtatttgcgcactcgcgacggttgatgcatcggtaaatatagctgtatctaatgttctagtcggtatttcatcatttcgctgtctaataatagcgttttctctatctgtttccattacagctgcctgaagtttattggtcggataatatgtaaaataataagaaatacatacgaataacaaaaataaaataagatataataaagatgccatttagagatctaattttgttcaacttgtccaaattcctacttacagaagatgaggaatcgttggagatagtgtcttccttatgtagaggatttgaaatatcttatgatgacttgataacttactttccagataggaaataccataaatatatttctaaagtatttgaacatgtagatttatcggaggaattaagtatggaattccatgatacaactttgcgagatttagtctatcttagattgtacaagtattccaagtgtatacggccgtgttataaattaggagataatctaaaaggcatagttgttataaaggacaggaatatttatattagggaagcaaatgatgacttgatagaatatctcctcaaggaatacactcctcagatttatacatattctaatgagcgcgtccccataactggttcaaaattaattctttgtggattttctcaagttacatttatggcgtatacaacgtcgcatataacaacaaataaaaaggtagatgttctcgtttccaaaaaatgtatagatgaactagtcgatccaataaattatcaaatacttcaaaatttatttgataaaggaagcggaacaataaacaaaatactcaggaagatattttattcggtaacaggtggccaaactccataggtagctttttctatttcggattttagaatttccaaattcaccagcgatttatctgttttggtgaaatccaaggatttattaatgtccacaaatgccatttgttttgtctgtggattgtatttgaaaatggaaacgatgtagttagatagatgcgctgcgaagtttcctattagggttccgcgcttcacgtcacccagcatacttgaatcaccatcctttaaaaaaaatgataagatatcaacatggagtatatcatactcggattttaattcttctactgcatcactgacattttcacaaatactacaatacggtttaccgaaaataatcagtacgttcttcatttatgggtatcaaaaacttaaaatcgttactgctggaaaataaatcactgacgatattagatgataatttatacaaagtatacaatggaatatttgtggatacaatgagtatttatatagccgtcgccaattgtgtcagaaacttagaagagttaactacggtattcataaaatacgtaaacggatgggtaaaaaagggagggcatgtaaccctttttatcgatagaggaagtataaaaattaaacaagacgttagagacaagagacgtaaatattctaaattaaccaaggacagaaaaatgctagaattagaaaagtgtacatccgaaatacaaaatgttaccggatttatggaagaagaaataaaggcagaaatgcaattaaaaatcgataaactcacatttcaaatatatttatctgattctgataacataaaaatatcattgaatgagatactaacacatttcaacaataatgagaatgttacattattttattgtgatgaacgagacgcagaattcgttatgtgtctcgaggctaaaacacatttctctaccacaggagaatggccgttgataataagtaccgatcaggatactatgctatttgcatctgctgataatcatcctaagatgataaaaaacttaactcaactgtttaaatatgttccatctgcagaggataactatttagcaaaattaacggcgttagtgaatggatgtgatttctttcctggactctatggggcatctataacacccaacaacttaaacaaaatacaattgtttagtgattttacaatcgataatatagtcactagtttggcaattaaaaattattatagaaagactaactctaccgtagacgtgcgtaatattgttacgtttataaacgattacgctaatttagacgatgtctactcgtatattcctccttgtcaatgcactgttcaagaatttatattttccgcattagatgaaaaatggaatgaatttaaatcatcttatttagaaagcgtgccgttaccctgccaattaatgtatgcgttagaaccacgcaaggagattgatgtttcagaagttaaaactttatcatcttatatagatttcgaaaatactaaatcagatatcgatgttataaaatctatatcctcgatcttcggatattctaacgaaaactgtaacacgatagtattcggcatctataaggataatttactactgagtataaatagttcattttactttaacgatagtctgttaataaccaatactaaaagtgataatataataaatataggttactagattaaaaatggtgttccaactcgtgtgctctacgtgcggcaaagatatttctcacgaacgatataaattgattatacgaaaaaaatcattaaaggatgtactcgtcagtgtaaagaacgaatgttgtaggttaaaattatctacacaaatagaacctcaacgtaacttaacagtgcaacctctattggatataaactaatatggatccggttaattttatcaagacatatgcgcctagaggttctattatttttattaattataccatgtcattaacaagtcatttgaatccatcgatagaaaaacatgtgggtatttattatggtacgttattatcggaacacttggtagttgaatcaacatatagaaaaggagttcgaatagtcccattggatagtttttttgaaggatatcttagtgcaaaagtatacatgttagagaatattcaagttatgaaaatagcagctgatacgtcattaactttattgggtattccgtatggatttggtcatgatagaatgtattgttttaaattggtagctgactgttataaaaatgccggtattgatacatcgtctaaacgaatattaggtaaagatatttttctgagccaaaacttcacagacgataatagatggataaagatatatgattctaataatttaacattttggcaaattgattaccttaaagggtgagttaatatgcataactactcctccgttgttttttccctcgttctttttcttaacgttgtttgccatcactctcataatgtaaagatattctaaaatggtaaacttttgcatatcggacgcagaaattggtataaatgttgtaattgtattatttcccgtcaatggactagtcacagctccatcagttttatatcctttagagtatttctcactcgtgtctaacattctagagcattccatgatctgtttatcgttgatattggccggaaagatagattttttattttttattatattactattggcaattgtagatataacttctggtaaatatttttctaccttttcaatctcttctattttcaagccggctatatattctgctatattgttgctagtatcaataccttttctggctaagaagtcatatgtggtattcactatatcagttttaactggtagttccattagcctttccacttctgcagaataatcagaaattggttctttaccagaaaatccagctactataataggctcaccgatgatcattggcaaaatcctatattgtaccagattaatgagagcatatttcatttccaataattctgctagttcttgagacattgatttatttgatgaatctagttggttctctagatactctaccatttctgccgcatacaataacttgttagataaaatcagggttatcaaagtgtttagcgtggctagaatagtgggcttgcatgtattaaagaatgcggtagtatgagtaaaccgttttaacgaattatatagtctccagaaatctgtggcgttacatacatgagccgaatgacatcgaagattgtccaatatttttaatagctgctctttgtccattatttctatatttgactcgcaacaattgtagataccattaatcaccgattcctttttcgatgccggacaatagcacaattgtttagctttggactctatgtattcagaattaatagatatatctcttaatacagattgcactatacattttgaaactatgtcaaaaattgtagaacgacgctgttctgcagccatttaactttaaataatttacaaaaatttaaaatgagcatccgtataaaaatcgataaactgcgccaaattgtggcatatttttcagagttcagtgaagaagtatctataaatgtagactcgacggatgagttaatgtatatttttgccgccttgggcggatctgtaaacatttgggccattatacctctcagtgcatcagtgttctaccgcggagccgaaaatattgtgtttaatcttcctgtgtccaaggtaaaatcgtgtttgtgtagttttcacaatgatgccatcatagatatagaacctgatctggaaaataatctagtaaaactttctagttatcatgtagtaagtgtcgattgtaataaggaactgatgcctattaggacagatactactatttgtctaagtatagatcaaaagaaatcttacgtgtttaattttcacaagtatgaagaaaaatgttgtggtagaaccgtcattcatttagaatggttgttgggctttatcaagtgtattagtcagcatcagcatttggctattatgtttaaagatgacaatattattatgaagactcctggtaatactgatgcattttccagggaatattctatgactgaatgttctcaagaactacaaaagttttctttcaaaatagctatctcgtctctcaacaaactacgaggattcaaaaagagagtcaatgtttttgaaactagaatcgtaatggataatgacgataacattttaggaatgttgttttcggatagagttcaatcctttaagatcaacatctttatggcgtttttagattaatactttcaatgagataaatatgggtggcggagtaagtgttgagctccctaaacgggatccgcctccgggagtacccactgatgagatgttattaaacgtggataaaatgcatgacgtgatagctcccgctaagcttttagaatatgtgcatataggaccactagcaaaagataaagaggataaagtaaagaaaagatatccagagtttagattagtcaacacaggacccggtggtctttcggcattgttaagacaatcgtataatggaaccgcacccaattgctgtcgcacttttaatcgtactcattattggaagaaggatggaaagatatcagataagtatgaagagggtgcagtattagaatcgtgttggccagacgttcacgacaccggaaaatgcgatgttgatttattcgactggtgtcagggggatacgttcgatagaaacatatgccatcagtggatcggttcagcctttaataggagtaatagaactgtagagggtcaacaatcgttaataaatctgtataataagatgcaaacattatgtagtaaagatgctagtgtaccaatatgtgaatcatttttgcatcatttacgcgcacacaatacagaagatagcaaagagatgatcgattatattctaagacaacagtctgcggactttaaacagaaatatatgagatgtagttatcccactagagataagttagaagagtcattaaaatatgcggaacctcgagaatgttgggatccagagtgttcgaatgccaatgttaatttcttgctaacacgtaattataataatttaggactttgcaatattgtacgatgtaatactagcgtgaacaacttacagatggataaaacttcctcattaagattgtcatgtggattaagcaatagtgatagattttctactgttcccgtcaatagagcaaaagtagttcaacataatattaaacactcgttcgacctaaaattgcatttgatcagtttattatctctcttggtaatatggatactaattgtagctatttaaatgggtgccgcggcaagcatacagacgacggtgaatacactcagcgaacgtatctcgtctaaattagaacaagaagcgaatgctagtgctcaaacaaaatgtgatatagaaatcggaaatttttatatccgacaaaaccatggatgtaacctcactgttaaaaatatgtgctctgcggacgcggatgctcagttggatgctgtgttatcagccgctacagaaacatatagtggattaacaccggaacaaaaagcatacgtgccagctatgtttactgctgcgttaaacattcagacgagtgtaaacactgttgttagagattttgaaaattatgtgaaacagacttgtaattctagcgcggtcgtcgataacaaattaaagatacaaaacgtaatcatagatgaatgttacggagccccaggatctccaacaaatttggaatttattaatacaggatctagcaaaggaaattgtgccattaaggcgttgatgcaattgacgactaaggccactactcaaatagcacctaaacaagttgctggtacaggagttcagttttatatgattgttatcggtgttataatattggcagcgttgtttatgtactatgccaagcgtatgttgttcacatccaccaatgataaaatcaaacttattttagccaataaggaaaacgtccattggactacttacatggacacattctttagaacttctccgatggttattgctaccacggatatgcaaaactgaaaatatattgataatattttaatagattaacatggaagttatcactgatcgtctagacgatatagtgaaacaaaatatagcggatgaaaaatttgtagattttgttatacacggtctagagcatcaatgtcctgctatacttcgaccattaattaggttgtttattgatatactattatttgttatagtaatttatatttttacggtacgtctagtaagtagaaattatcaaatgttgttggcgttggtggcgctagtcatcacattaactattttttattactttatactataatagtactagactgacttctaacaaacatctcacctgccataaataaatgcttgatattaaagtcttctatttctaacactattccatctgtggaaaataatactctgacattatcgctaattgacacatcggtgagtgatatgcctataaagtaataatcttctttgggcacatataccagtgtaccaggttctaacaacctatttactggtgctcctatagcatactttttctttaccttgagaatatccatcgtttgcttggtcaatagcgatatgtgattttttatcaaccactcgaaaaagtaattggagtgttcatatcctctacgggctattgtctcatggccgtgtatgaaatttaagtaacacgactgtggtagatttgttctatagagccggttgccgcaaatagatagaactaccaatatgtctgtacaaatgttaaacattaattgattaacagaaaaaacaatgttcgttctgggaatagaaaccagatcaaaacaaaattcgttagaatatatgccacgtttatacattgaatataaaataactacagtttgaaaaataacagtatcatttaaacatttaacttgcggggttaatctcacaactttactgtttttgaactgttcaaaatatagcatagatccgtgagaaatacgtttagccgcctttaatagaggaaatcccaccgcctttctggatctcaccaacgacgatagttctgaccagcaactcatttcttcatcatccacctgttttaacatataataggcaggagatagatatccgtcattgcaatattccttctcgtaggcacacaatctaatattgataaaatctccattctcttctctgcatttattatcttgtttcggtggctgattaggctgtagtcttggtttaggctttggtatatcgttgttgaatctattttggtcattaaatctttcatttcttcctggtatatttttatcacctcgtttggttggatttttgtctatattatcgtttgtaacatcggtacgggtattcatttatcacaaaaaaaacttctctaaatgagtctactgctagaaaacctcatcgaagaagataccatattttttgcaggaagtatatctgagtatgatgatttacaaatggttattgccggcgcaaaatccaaatttccaagatctatgctttctatttttaatatagtacctagaacgatgtcaaaatatgagttggagttgattcataacgaaaatatcacaggagcaatgtttaccacaatgtataatataagaaacaatttgggtctaggagatgataaactaactattgaagccattgaaaactatttcttggatcctaacaatgaagttatgcctcttattattaataatacggatatgactgccgtcattcctaaaaaaagtggtaggagaaagaataagaacatggttatcttccgtcaaggatcatcacctatcttgtgtattttcgaaactcgtaaaaagattaatatttataaagaaaatatggaatccgcgtcgactgagtatacacctatcggagacaacaaggctttgatatctaaatatgcgggaattaatatcctaaatgtgtattctccttccacatccataagattgaatgccatttacggattcaccaataaaaataaactagagaaacttagtactaataaggaactagaatcgtatagttctagccctcttcaagaacccattaggttaaatgattttctgggactattggaatgtgttaaaaagaatattcctctaacagatattccgacaaaggattgattactataaatggagaatgttcctaatgtatactttaatcctgtgtttatagagcccacgtttaaacattctttattaagtgtttataaacacagattaatagttttatttgaagtattcgttgtattcattctaatatatgtattttttagatctgaattaaatatgttcttcatgcctaaacgaaaaatacccgatcctattgatagattacgacgtgctaatctagcgtgtgaagacgataaattaatgatctatggattaccatggatgacaactcaaacatctgcgttatcaataaatagtaaaccgatagtgtataaagattgtgcaaagcttttgcgatcaataaatggatcacaaccagtatctcttaacgatgttcttcgcagatgatgattcattttttaagtatttggctagtcaagatgatgaatcttcattatctgatatattgcaaatcactcaatatctagactttctgttattattattgatccaatcaaaaaataaattagaagccgtgggtcattgttatgaatctctttcagaggaatacagacaattgacaaaattcacagactttcaagattttaaaaaactgtttaacaaggtccctattgttacagatggaagggtcaaacttaataaaggatatttgttcgactttgtgattagtttgatgcgattcaaaaaagaatcctctctagctaccaccgcaatagatcctgttagatacatagatcctcgtcgcaatatcgcattttctaacgtgatggatatattaaagtcgaataaagtgaacaataattaattctttattgtcatcatgaacggcggacatattcagttgataatcggccccatgttttcaggtaaaagtacagaattaattagacgagttagacgttatcaaatagctcaatataaatgcgtgactataaaatattctaacgataatagatacggaacgggactatggacgcatgataagaataattttgaagcattggaagcaactaaactatgtgatgtcttggaatcaattacagatttctccgtgataggtatcgatgaaggacagttctttccagacattgttgaattctgtgagcgtatggcaaacgaaggaaaaatagttatagtagccgcactcgatgggacatttcaacgtaaaccgtttaataatattttgaatcttattccattatctgaaatggtggtaaaactaactgctgtgtgtatgaaatgctttaaggaggcttccttttctaaacgattgggtgaggaaaccgagatagaaataataggaggtaatgatatgtatcaatcggtgtgtagaaagtgttacatcgactcataatattatattttttatctaaaaaactaaaaataaacattgattaaattttaatataatacttaaaaatggatgttgtgtcgttagataaaccgtttatgtattttgaggaaattgataatgagttagattacgaaccagaaagtgcaaatgaggtcgcaaaaaaactgccgtatcaaggacagttaaaactattactaggagaattattttttcttagtaagttacagcgacacggtatattagatggtgccaccgtagtgtatataggatctgctcccggtacacatatacgttatttgagagatcatttctataatttaggagtgatcatcaaatggatgctaattgacggccgccatcatgatcctattttaaatggattgcgtgatgtgactctagtgactcggttcgttgatgaggaatatctacgatccatcaaaaaacaactgcatccttctaagattattttaatttctgatgtgagatccaaacgaggaggaaatgaacctagtacggcggatttactaagtaattacgctctacaaaatgtcatgattagtattttaaaccccgtggcgtctagtcttaaatggagatgcccgtttccagatcaatggatcaaggacttttatatcccacacggtaataaaatgttacaaccttttgctccttcatattcagctgaaatgagattattaagtatttataccggtgagaacatgagactgactcgagttaccaaatcagacgctgtaaattatgaaaaaaagatgtactaccttaataagatcgtccgtaacaaagtagttgttaactttgattatcctaatcaggaatatgactattttcacatgtactttatgctgaggaccgtgtactgcaataaaacatttcctactactaaagcaaaggtactatttctacaacaatctatatttcgtttcttaaatattccaacaacatcaactgaaaaagttagtcatgaaccaatacaacgtaaaatatctagcaaaaattctatgtctaaaaacagaaatagcaagagatccgtacgcagtaataaatagaaacgtactactgagatatactaccgatatagagtataatgatttagttactttaataaccgttagacataaaattgattctatgaaaactgtgtttcaggtatttaacgaatcatccataaattatactccggttgatgatgattatggagaaccaatcattataacatcgtatcttcaaaaaggtcataacaagtttcctgtaaattttctatacatagatgtggtaatatctgacttatttcctagctttgttagactagatactacagaaactaatatagttaatagtgtactacaaacaggcgatggtaaaaagactcttcgtcttcccaaaatgttagagacggaaatagttgtcaagattctctatcgccctaatataccattaaaaattgttagatttttccgcaataacatggtaactggagtagagatagccgatagatctgttatttcagtcgctgattaatcaattagtagagatgagataagaacattataataatcaataatatatcttatatctcgtttagaaaaatgctaatattaaaatagctaacgctagtaatccaatcggaagccatttgatatctataatagggtatctaatttcctgattcagatagcggacagctatattctcggtagctactcgtttggaatcacaaacattatttacatctaatttactatctgtaatggaaacgtttcccaatgaaatggtacaatccgatacattgcattttgttatatttttttttaaagaggctggtaacaacgcatcgcttcgtttacatggctcgtaccaacaataatagggtaatcttgtatctattcctatccgtactatgcttttatcaggataaatacatttacatcgtatatcgtctttgttagcatcacagaatgcataaatttgttcgtccgtcatgataaaaatttaaagtgtaaatataactattatttttatagttgtaataaaaagggaaatttgattgtataccttcggttctttaaaagaaactgacttgataaaaatggctgtaatctctaaggttacgtatagtctatatgatcaaaaagagattaatgctacagatattatcattagtcatgttaaaaatgacgacgatatcggtaccgttaaagatggtagactaggtgctatggatggggcattatgtaagacttgtgggaaaacggaattggaatgtttcggtcactggggtaaagtaagtatttataaaactcatatagttaagcctgaatttatttcagaaattattcgtttactgaatcatatatgtattcactgcggattattgcgttcacgagaaccgtattccgacgatattaacctaaaagagttatcgggacacgctcttaggagattaaaggataaaatattatccaagaaaaagtcatgttggaacagtgaatgtatgcaaccgtatcaaaaaattactttttcaaagaaaaaggtttgtttcgtcaacaagttggatgatattaacgttcctaattctctcatctatcaaaagttaatttctattcatgaaaagttttggccattattagaaattcatcaatatccagctaacttattttatacagactactttcccatccctccgttgattattagaccggctattagtttttggatagatagtatacccaaagaaaccaatgaattaacttacttattaggtatgatcgttaagaattgtaacttgaatgctgatgaacaggttatccagaaggcggtaatagaatacgatgatattaaaattatttctaataacacttccagtatcaatttatcatatattacatccggcaaaaataatatgattagaagttatatcgtcgcccgacgaaaagatcagacggctagatctgtaattggtcccagtacatctatcaccgttaatgaggtaggaatgcccgcatatattagaaatacacttacagaaaagatatttgttaatgcctttacagtggataaagttaaacaactattagcatcaaaccaagttaaattttactttaataaacgattaaaccaattaacaagaatacgccaaggaaagtttatcaaaaataaaatacatttattgcctggtgattgggtagaagtagctgttcaagaatatacaagtattatttttggaagacagccgtctctacatagatacaacgtcatcgcttcatctatcagagctaccgaaggagatactatcaaaatatctcccggaattgccaactctcaaaatgctgatttcgacggagatgaagaatggatgatattagaacaaaatcctaaagctgtaattgaacaaagtattcttatgtatccgacgacgttactcaaacacgatattcatggagcccccgtttatggatctattcaagatgaaatcgtagcagcgtattcattgtttaggatacaagatctttgtttagatgaagtattgaacatcttggggaaatatggaagagagttcgatcctaaaggtaaatgtaaattcagcggtaaagatatctatacttacttgataggtgaaaagattaattatccgggtctcttaaaggatggtgaaattattgcaaacgacgtagatagtaattttgttgtggctatgaggcatctgtcattggctggactcttatccgatcataagtcgaacgtggaaggtatcaactttattatcaagtcatcttatgtttttaagagatatctatctatttacggttttggggtgacattcaaagatctgagaccaaattcgacgttcactaataaattggaggccatcaacgtagaaaaaatagaacttatcaaagaagcatacgccaaatatctcaacgatgtaagagacgggaaaatagttccattatctaaagctttagaggcggactatgtggaatccatgttatccaacttgacaaatcttaatatccgagagatagaagaacatatgagacaaacgctgatagatgatccagataataacctcctgaaaatggccaaagcgggttataaagtaaatcctacagaactaatgtatattctaggtacgtatggacaacaaaggattgatggtgaaccagcagagactcgagtattgggtagagtcttaccttactatcttccagactctaaggatccagaaggaagaggttacattcttaattctttaacaaaaggattaacaggttctcaatattacttttcgatgctggttgcaagatctcaatctactgatatcgtctgtgaaacatcacgtaccggaacactggctagaaaaatcattaaaaagatggaggatatggtggtcgacggatacggacaagtagttataggtaatacgctcatcaagtacgccgccaattataccaaaattctaggctcagtatgtaaacctgtagatcttatctatccagatgagtccatgacttggtatttggaaattagtgctctgtggaataaaataaaacagggattcgtttactctcagaaacagaaacttgcaaagaagacattggcgccgtttaatttcctagtattcgtcaaacccaccactgaggataatgctattaaggttaaggatctgtacgatatgattcataacgtcattgatgatgtgagagagaaatacttctttacggtatctaatatagattttatggagtatatattcttgacgcatcttaatccttctagaattagaattacaaaagaaacggctatcactatctttgaaaagttctatgaaaaactcaattatactctaggtggtggaactcctattggaattatttctgcacaggtattgtctgagaagtttacacaacaagccctgtccagttttcacactactgaaaaaagtggtgccgtcaaacaaaaacttggtttcaacgagtttaataacttgactaatttgagtaagaataagaccgaaattatcactctggtatccgatgatatctctaaacttcaatctgttaagattaatttcgaatttgtatgtttgggagaattaaatccagacatcactcttcgaaaagaaacagataggtatgtagtagatataatagtcaatagattatacatcaagagagcagaaattaccgaattagtcgtcgaatatatgattgaacgattcatctcctttagcgtcattgtaaaggaatggggtatggaaacattcattgaggacgaggataatattagatttactgtctatctaaatttcgttgaaccagaggaattgaatcttagtaagtttatgatggttcttccgggggcagccaacaagggaaagattagtaaattcaagattcctatctctgattatacgggttatgacgacttcaatcaaacaaaaaagctcaataagatgactgtagaactcatgaatctaaaagaattaggttctttcgatttggaaaacgtcaacgtgtatcctggagtatggaatacatacgatatcttcggtatcgaggccgctcgtgaatacttgtgcgaagccatgttaaacacctatggagaagggttcgattatctgtatcagccttgtgatcttctcgctagtttactatgtgctagttacgaaccagaatcagtgaataaattcaagttcggcgcagctagtactcttaagagagctacgttcggagacaataaagcattgttaaacgcggctcttcataaaaagtcagaacctattaacgataatagtagctgccacttttttagcaaggtccctaatataggaactggatattacaaatactttatcgacttgggtcttctcatgagaatggaaaggaaactatctgataagatatcttctcaaaagatcaaggaaatggaagaaacagaagacttttaattcttatcaataacatatttttctatgatctgtcttttaaacgatggattttccacaaatgcgcctctcaagtccctcatagaatgatacacgtataaaaaatatagcataggcaatgactccttatttttagacattagatatgccaaaatcatagccccgcttctatttactcccgcagcacaatgaaccaacacgggctcgtttcgttgatcacatttagataaaaaggcggttacgtcgtcaaaatatttactaatatcggtagttgtatcatctaccaacggtatatgaataatattaatattagagttaggtaatgtatatttatccatcgtcaaatttaaaacatatttgaacttaacttcagatgatggtgcatccatagcatttttataatttcccaaatacacattattggttacccttgtcattatagtgggagatttggctctgtgcatatctccagttgaacgtagtagtaagtatttatacaaacttttcttatccatttataacgtacaaatggataaaactactttatcggtaaacgcgtgtaatttagaatacgttagagaaaaggctatagtaggcgtacaagcagccaaaacatcaacacttatattctttgttattatattggcaattagtgcgctattactctggtttcagacgtctgataatccagtctttaatgaattaacgagatatatgcgaattaaaaatacggttaacgattggaaatcattaacggatagcaaaacaaaattagaaagtgatagaggtagacttctagccgctggtaaggatgatatattcgaattcaaatgtgtggatttcggcgcctattttatagctatgcgattggataagaaaacatatctgccgcaagctattaggcgaggtactggagacgcgtggatggttaaaaaggcggcaaaggtcgatccatctgctcaacaattttgtcagtatttgataaaacacaagtctaataatgttattacttgtggtaatgagatgttaaatgaattaggttatagcggttattttatgtcaccgcattggtgttccgattttagtaatatggaatagtgttagataaatgcggtaacgaatgttcctgtaaggaaccataacagtttagatttaacgttaaagatgagcataaacataataaacaaaattacaatcaaacctataacattaatatcaaacaatccaaaaaatgaaatcagtggagtagtaaacgcgtacataactcctggataacgtttagtagctgccgttcctattctagaccaaaaattcggtttcatgttttcgaaacggtgttctgcaacaagtcggggatcgtgttctacatatttggcggcattatccagtatctgcctattgatcttcatttcgttttcaattctggctatttcaaaataaaatcccgatgatagacctccagactttataatttcatctacgatgttcagcgccgtagtaactctaataatataggctgataagctaacatcataccctcctgtatatgtgaatatggcatgatttttgtccattacaagctcggttttaactttattgcctgtaataatttctctcatctgtaggatatctatttttttgtcatgcattgccttcaagacgggacgaagaaacgtaatatcctcaataacgttatcgttttctacaataactacatattctacctttttattttctaactcggtaaaaaaattagaatcccatagggctaaatgtctagcgatatttcttttcgtttcctctgtacacatagtgttacaaaaccctgaaaagaagtgagtatacttgtcatcatttctaatgtttcctccagtccactgtataaacgcataatccttgtaatgatctggatcatccttgactaccacaacatttcttttttctggcataacttcgttgtcctttacatcatcgaacttctgatcattaatatgctcatgaacattaggaaatgtttctgatggaagtctatcaataactggcacaacaataacaggagttttcgccgccgccatttagttattgaaattaatcatatacaactctttaatacgagttatattttcgtctatccattgtttcacatttacatatttcgacaaaaagatataaaatgcgtattccaatgcttctctgtttaatgaattactaaaatatacaaacacgtcactgtctggcaataaatgatatcttagaatattgtaacaatttattttgtattgcacatgttcgtgatctatgagttcttcttcgaatggcataggatctccgaatctgaaaacgtataaataggagttagaataataatatttgagagtattggtaatatataaactctttagcggtataattagtttttttctctcaatttctatttttagatgtgatggaaaaatgactaattttgtagcattagtatcatgaactctaatcaaaatcttaatatcttcgtcacacgttagctctttgaagtttttaagagatgcatcagttggttcgaccgatggagtaggtgcaacaattttttgttcgatgtatgtatgtactggagccattgttttaactataatggtgcttgtatcgaaaaactttaatgcagatagcggaagctcttcgccgcgactttctacatcgtaattgggttctaacgccgatctctgaatggatactagttttctaagttctaatgtgattctctgaaaatgtaaatccaattcctccggcattatagatgtgtatacatcggtaaataaaactatagtatccaacgatcccttctcgcaaattctagtcttaaccaaaaaatcgtatataaccacggagatggcgtatttaagagtggattcttctaccgttttgttcttggatgtcatataggaaactataaagtccgcactactgttaagaatgattactaacgcaactatatagttcaaattaagcattttggaaacataaaataactctgtagacgatacttgactttcgaataagtttgcagacaaacgaagaaagaacagacctctcttaatttcagaagaaaactttttttcgtattcctgacgtctagagtttatatcaataagaaagttaagaattagtcggttaatgttgtatttcattacccaagtttgagatttcataatattatcaaaagacatgataatattaaagataaagcgctgactatgaacgaaatagctatatggttcgctcaaaaatatagtcttgttaaacgtggaaacgataactgtatttttaatcacgtcagcggcatctaaattaaatataggtatatttattccacacactctacaatatgccacaccatcttcataataaataaattcgttagcaaaattattaattttagtgaaatagttagcgtcaactttcatagcttccttcaatctaatttgatgctcacacggtgcgaattccactctaacatcccttttccatgcctcaggttcatcgatctctataatatctagttttttgcgtttcacaaacacaggctcgtctctcgcgatgagatctgtatagtaactatgtaaatgataactagatagaaagatgtagctatatagatgacgatcctttaagagaggtataataactttaccccaatcagatagactgttgttatggtcttcggaaaaagaatttttataaatttttccagtattttccaaatatacgtacttaacatctaaaaaatccttaatgataataggaatggataatccgtctattttataaagaaatacatatcgcacattatacttttttttggaaatgggaataccgatgtgtctacataaatatgcaaagtctaaatattttttagagaatcttaattggtccaaattcttttccaagtacggtaatagatttttcatattgaacggtatcttcttaatctctggttctagttccgcattaaatgatgaaactaagtcactatttttataactaacgattacatcacctctaacatcatcatttaccagaatactgatcttcttttgtcgtaaatacatgtctaatgtgttaaaaaaaagatcatacaagttatacgtcatttcatctgtggtattcttgtcattgaaggataaactcgtactaatctcttctttaacagcctgttcaaatttatatcctatatacgaaaaaatagcaaccagtgtttgatcatccgcgtcaatattctgttctatcgtagtgtataacaatcgtatatcttcttctgtgatagtcgatacgttataaaggttgataacgaaaatatttttatttcgtgaaataaagtcatcgtaggattttggacttatattcgcgtctagtagatatgcttttatttttggaatgatctcaattagaatagtctctttagagtccatttaaagttacaaacaactaggaaattggtttatgatgtataatttttttagtttttatagattctttattctatacttaaaaaatgaaaataaatacaaaggttcttgagggttgtgttaaattgaaagcgagaaataatcataaattatttcattatcgcgatatccgttaagtttgtatcgtaatggcgtggtcaattacaaataaagcggatactagtagcttcacaaagatggctgaaatcagagctcatctaaaaaatagcgctgaaaataaagataaaaacgaggatattttcccggaagatgtaataattccatctactaagcccaaaaccaaacgagccactactcctcgtaaaccagcggctactaaaagatcaaccaaaaaggaggaagtggaagaagaagtagttatagaggaatatcatcaaacaactgaaaaaaattctccatctcctggagtcagcgacattgtagaaagcgtggccgctgtagagctcgatgatagcgacggggatgatgaacctatggtacaagttgaagctggtaaagtaaatcatagtgctagaagcgatctctctgacctaaaggtggctaccgacaatatcgttaaagatcttaagaaaattattactagaatctctgcagtatcgacggttctagaggatgttcaagcagctggtatctctagacaatttacttctatgactaaagctattacaacactatctgatctagtcaccgagggaaaatctaaagttgttcgtaaaaaagttaaaacttgtaagaagtaaatgcgtgcacttttttataaagatggtaaactctttaccgataataattttttaaatcctgtatcagacgataatccagcgtatgaggttttgcaacatgttaaaattcctactcatttaacagatgtagtagtatatgaacaaacgtgggaggaggcgttaactagattaatttttgtgggaagtgattcaaaaggacgtagacaatacttttacggaaaaatgcatgtacagaatcgcaacgctaaaagagatcgtatttttgttagagtatataacgttatgaaacgaattaattgttttataaacaaaaatataaagaaatcgtccacagattccaattatcagttggcggtttttatgttaatggaaactatgttttttattagatttggtaaaatgaaatatcttaaggagaatgaaacagtagggttattaacactaaaaaataaacacatagaaataagtcccgatgaaatagttatcaagtttgtaggaaaggacaaagtttcacatgaatttgttgttcataagtctaatagactatataagccgctattgaaactgacggatgattctagtcccgaagaatttctgttcaacaaactaagtgaacgaaaggtatatgaatgtatcaaacagtttggtattagaatcaaggatctccgaacgtatggagtcaattatacgtttttatataatttttggacaaatgtaaagtccatatctcctcttccatcaccaaaaaagttaatagcgttaactatcaaacaaactgctgaagtggtaggtcatactccatcaatttcaaaaagagcttatatggcaacgactattttagaaatggtaaaggataaaaattttttagatgtagtatctaaaactacgttcgatgaattcctatctatagtcgtagatcacgttaaatcatctacggatggatgatatagatctttacacaaataattacaaaaccgataaatggaaatggataagcgtatgaaatctctcgcaatgaccgctttctttggggagctaagcacattagatattatggcattgataatgtctatatttaaacgccatccaaacaataccattttttcagtggataaggatggtcagtttatgattgatttcgaatacgataattataaggcttctcaatatttggatctgaccctcactccgatatctggagatgaatgcaagactcacgcatcgagtatagccgaacaattggcgtgtgtggatattattaaagaggatattagcgaatatatcaaaactactccccgtcttaaacgatttataaaaaaataccgcaatagatcagatactcgcatcagtcgagatacagaaaagcttaaaatagctctagctaaaggcatagattacgaatatataaaagacgcttgttaataagtaaatgaaaaaaaactagtcgtttataataaaacacgatatggatgccaacgtagtatcatcttctactattgcgacgtatatagacgctttagcgaagaatgcttcggaattagaacagaggtctaccgcatacgaaataaataatgaattggaactagtatttattaagccgccattgattactttgacaaatgtagtgaatatctctacgattcaggaatcgtttattcgatttaccgttactaataaggaaggtgttaaaattagaactaagattccattatctaaggtacatggtctagatgtaaaaaatgtacagttagtagatgctatagataacatagtttgggaaaagaaatcattagtgacggaaaatcgtcttcacaaagaatgcttgttgagactatcgacagaggaacgtcatatatttttggattacaagaaatatggatcctctatccgactagaattagtcaatcttattcaagcaaaaacaaaaaactttacgatagactttaagctaaaatattttctaggatccggtgcccagtctaaaagttctttattacacgctattaatcatccaaagtcaaggcctaatacatctctggaaatagaatttacacctagagacaatgaaacagttccatatgatgaactaataaaggaattgacgactctctcgcgtcatatatttatggcttctccagagaatgtaattctttctccgcctattaacgcgcctataaaaacctttatgttgcctaaacaagatatagtaggtttggatctggaaaatctatatgccgtaactaagactgacggcattcctataactatcagagttacatcaaacgggttgtattgttattttacacatcttggttatattattagatatcctgttaagagaataatagattccgaagtagtagtctttggtgaggcagttaaggataagaactggaccgtatatctcattaagctaatagagcctgtgaatgcaatcaatgatagactagaagaaagtaagtatgttgaatctaaactagtggatatttgtgatcggatagtattcaagtcaaagaaatacgaaggtccgtttactacaactagtgaagtcgtcgatatgttatctacatatttaccaaagcaaccagaaggtgttattctgttctattcaaagggacctaaatctaacattgattttaaaattaaaaaggaaaatactatagaccaaactgcaaatgtagtatttaggtacatgtccagtgaaccaattatctttggagagtcgtctatctttgtagagtataagaaatttagcaacgataaaggctttcctaaagaatatggttctggtaagattgtgttatataacggcgttaattatctaaataatatctattgtttggaatatattaatacacataatgaagtgggtattaagtccgtggttgtacctattaagtttatagcagaattcttagttaatggagaaatacttaaacctagaattgataaaaccatgaaatatattaactcagaagattattatggaaatcaacataatatcatagtcgaacatttaagagatcaaagcatcaaaataggagatatctttaacgaggataaactatcggatgtgggacatcaatacgccaataatgataaatttagattaaatccagaagttagttattttacgaataaacgaactagaggaccgttgggaattttatcaaactacgtcaagactcttcttatttctatgtattgttccaaaacatttttagacgattccaacaaacgaaaggtattggcgattgattttggaaacggtgctgacctggaaaaatacttttatggagagattgcgttattggtagcgacggatccggatgctgatgctatagctagaggaaatgaaagatacaacaaattaaactctggaattaaaaccaagtactacaaatttgactacattcaggaaactattcgatccgatacatttgtctctagtgtcagagaagtattctattttggaaagtttaatatcatcgactggcagtttgctatccattattcttttcatccgagacattatgctaccgtcatgaataacttatccgaactaactgcttctggaggcaaggtattaatcactaccatggacggagacaaattatcaaaattaacagataaaaagacttttataattcataagaatttacctagtagcgaaaactatatgtctgtagaaaaaatagctgatgatagaatagtggtatataatccatcaacaatgtctactccaatgactgaatacattatcaaaaagaacgatatagtcagagtgtttaacgaatacggatttgttcttgtagataacgttgatttcgctacaattatagaacgaagtaaaaagtttattaatggcgcatctacaatggaagatagaccatctacaagaaactttttcgaactaaatagaggagccattaaatgtgaaggtttagatgtcgaagacttacttagttactatgttgtttatgtcttttctaagcggtaaataataatatggtatgggttctgatctcccagttctaaatgcattaaataattccaatagagcgatttttgttcctataggaccttccaactgtggatactctgtattgttaatagatatattaatacttttgtcgggtaacagaggttctacgtcttttaaaaataaaagtttgataacatctggcctgttcataaataaaaacttggcgattctatatatactcttattatcaaatctagccattgtcttatagatgtgagctactgtaggtgtaccatttgattttctttctaatactatatatttctctcgaagaagttcttgcacatcatctgggaataaaatactactgttgagtaaatcagttattttttttatatcgatattgatggacatttttatagttaaggataataagtatcccaaagtagataacgacgataacgaagtatttatacttttaggaaatcacaatgactttatcagattaaaattaacaaaattaaaggagcatgtatttttttctgaatatattgtgactccagatacatatggatctttatgcgtcgaattaaatgggtctagttttcagcacggcggtagatatatagaggtggaggaatttatagatgctggaagacaagttagatggtgttctacatccaatcatatatctaaagatatacccgaagatatgcacactgataaatttgtcatttatgatatatacacttttgacgctttcaagaataaacgattggtattcgtacaggtacctccgtcgttaggagatgatagtcatttgactaatccgttattgtctccgtattatcgtaattcagtagccagacaaatggtcaatgatatgatttttaatcaagattcatttttaaaatatttattagaacatctgattagaagccactatagagtttctaaacatataacaatagttagatacaaggataccgaagaattaaatctaacgagaatatgttataatagagataagtttaaggcgtttgtattcgcttggtttaacggcgtttcggaaaatgaaaaggtactagatacgtataaaaaggtatctaatttgatataatgaattcagtgactgtatcacacgcgccatatactattacttatcacgatgattgggaaccagtaatgagtcaattggtagagttttataacgaagtagccagttggctgctacgagacgagacgtcgcctattcctgataagttctttatacagttgaaacaaccgcttagaaataaacgagtatgtgtgtgcggtatagatccgtatccgaaagatggaactggtgtaccgttcgaatcaccaaattttacaaaaaaatcaattaaggagatagcttcatctatatctagattaaccggagtaattgattataaaggttataaccttaatataatagacggggttataccctggaattattacttaagttgtaaattaggagaaacaaaaagtcacgcgatctactgggataagatttccaagttactgctgcagcatataactaaacacgttagtgttctttattgtttgggtaaaacagatttctcgaatatacgggccaagttagaatccccggtaactaccatagtcggatatcatccagcggctagagaccgccaattcgagaaagatagatcatttgaaattatcaacgttttactggaattagacaacaaggcacctataaattgggctcaagggtttatttattaatgctttagtgaaattttaacttgtgttctaaatggatgcggctattagaggtaatgatgttatctttgttcttaagactataggtgtcccgtcagcgtgcagacaaaatgaagatccaagatttgtagaagcatttaaatgcgacgagttagaaagatatattgagaataatccagaatgtacactattcgaaagtcttagggatgaggaagcatactctatagtcagaattttcatggatgtagatttagacgcgtgtctagacgaaatagattatttaacggctattcaagattttattatcgaggtgtcaaactgtgtagctagattcgcgtttacagaatgcggcgccattcatgaaaatgtaataaaatccatgagatctaatttttcattgactaagtctacaaatagagataaaacaagttttcatattatctttttagacacgtataccactatggatacattgatagctatgaaacgaacactattagaattaagtagatcatctgaaaatccactaacaagatcgatagacactgccgtatataggagaaaaacaactcttcgggttgtaggtactaggaaaaatccaaattgcgacactattcatgtaatgcaaccaccgcatgataatatagaagattacctattcacttacgtggatatgaacaacaatagttattacttttctctacaacaacgattggaggatttagttcctgataagttatgggaaccagggtttatttcattcgaagacgctataaaaagagtttcaaaaatattcattaattctataataaactttaatgatctcgatgaaaataattttacaacggtaccactggtcatagattacgtaacaccttgtgcattatgtaaaaaacgatcgcataaacatccgcatcaactatcgttggaaaatggtgctattagaatttacaaaactggtaatccacatagttgtaaagttaaaattgttccgttggatggtaataaactgtttaatattgcacaaagaattttagacactaactctgttttattaaccgaacgaggagaccatatagtttggattaataattcatggaaatttaacagcgaagaacccttgataacaaaactaattttgtcaataagacatcaactacctaaggaatattcaagcgaattactctgtccaagaaaacgaaagactgtagaagctaacatacgagacatgttagtagattcagtagagaccgatacctatccggataaacttccgtttaaaaatggtgtattggacctggtagacggaatgttttactctggagatgatgctaaaaaatatacgtgtactgtatcaaccggatttaaatttgacgatacaaagttcgtcgaagacagtccagaaatggaagagttaatgaatatcattaacgatatccaaccattaacggatgaaaataagaaaaatagagagctatatgaaaaaacattatctagttgtttatgcggtgctaccaaaggatgtttaacattcttttttggagaaactgcaactggaaagtcgacaaccaaacgtttgttaaagtctgctatcggtgacctgtttgttgagacgggtcaaacaattttaacagatgtattggataaaggacctaatccatttatcgctaacatgcatttgaaaagatctgtattctgtagcgaactacctgattttgcctgtagtggatcaaagaaaattagatctgacaatattaaaaagttgacagaaccttgtgtcattggaagaccgtgtttctccaataaaattaataatagaaaccatgcgacaatcattatcgatactaattacaaacctgtttttgataggatagataacgcattaatgagaagaattgccgtcgtgcgattcagaacacacttttctcaaccttctggtagagaggctgctgaaaataatgacgcgtacgataaagtcaaactattagacgaggggttagatggtaaaatacaaaataatagatatagattcgcatttctatacttgttggtgaaatggtacagaaaatatcatgttcctattatgaaactatatcctacacccgaagagattcctgactttgcattctatctcaaaataggtactctgttagtatctagctctgtaaagcatattccattaatgacggacctctccaaaaagggatatatattgtacgataatgtggtcactcttccgttgactactttccaacagaaaatatccaagtattttaattctagactatttggacacgatatagagagcttcatcaatagacataagaaatttgccaatgttagtgatgaatatctgcaatatatattcatagaggatatttcatctccgtaaatatatgctcatatatttatagaagatatcacatatctaaatgaataccggaatcatagatttatttgataatcatgttgatagtataccaactatattacctcatcagttagctactctagattatctagttagaactatcatagatgagaacagaagcgtgttattgttccatattatgggatcaggtaaaacaataatcgctttgttgttcgccttggtagcttccagatttaaaaaggtttacattctagtgcctaatatcaacattttgaaaatttttaattataatatgggtgtagctatgaacttgtttaatgacgaattcatagctgagaatatctttattcattccacaacaagtttttattctcttaattataacgataacgtcattaattataacggattatctcgctacaataactctatttttatcgttgatgaggcacataatatctttgggaataatactggagaacttatgaccgtgataaaaaataaaaacaagattccttttctactattgtctggatctcccattactaacacacctaatactctgggtcatattatagatttaatgtccgaagagacgatagattttggtgagattattagtcgtggtaagaaagtaattcagacacttcttaacgaacgcggtgtgaatgtacttaaggatttgcttaaaggaagaatatcatattacgaaatgcctgataaagatctaccaacgataagatatcacggacgtaagtttctagatactagagtagtatattgtcacatgtctaaacttcaagagagagattatatgattactagacgacagctatgttatcatgaaatgtttgataaaaatatgtataacgtgtcaatggcagtattgggacaacttaatctgatgaataatttagatactttatttcaggaacaggataaggaattgtacccaaatctgaaaataaataatggcgtgttatacggagaagaattggtaacgttaaacattagttccaaatttaaatactttattaatcggatacagacactcaacggaaaacattttatatacttttctaattctacatatggcggattggtaattaaatatatcatgctcagtaatggatattctgaatataatggttctcagggaactaatccacatatgataaacggcaaaccaaaaacatttgctatcgttactagtaaaatgaaatcgtctttagaggatctattagatgtgtataattctcctgaaaacgatgatggtagtcaattgatgtttttgttttcgtcaaacattatgtccgaatcctatactctgaaagaggtaaggcatatttggtttatgactatcccagatactttttctcaatacaaccaaattcttggacgatctattagaaaattctcttacgccgatatttctgaaccagttaatgtatatcttttagccgccgtatattccgatttcaatgacgaagtaacgtcattaaacgattacacacaggatgaattgattaatgttttaccatttgacatcaaaaagctgttatatctaaaatttaagactaaagaaacgaatagaatatactctattcttcaagagatgtctgaaacgtattctcttccaccacatccatcaattgtaaaagttttattgggagaattggtcagacaatttttttataataattctcgtattaagtataacgactccaagttacttaaaatggttacatcagttataaaaaataaagaagacgctaggaattacatagatgatattgtaaacggtcacttctttgtatcgaataaagtatttgataaatctcttttatacaaatacgaaaacgatattattacagtaccgtttagactttcctacgaaccatttgtttggggagttaactttcgtaaagaatataacgtggtatcttctccataaaactgatgaaatatataaagaaataaatgtcgagctttgttaccaatggataccttccagttacattggaaccacacgagctgacgttagacataaaaactaatattaggaatgccgtatataagacgtatctccatagagaaattagtggtaaaatggccaagaaaatagaaattcgtgaagacgtggaattacctctcggcgaaatagttaataattctgtagttataaacgttccgtgtgtaataacctacgcgtattatcacgttggggatatagtcagaggaacattaaacatcgaagatgaatcaaatgtaactattcaatgtggagatttaatctgtaaactaagtagagattcgggtactgtatcatttagcgattcaaagtactgcttttttcgaaatggtaatgcgtatgacaatggcagcgaagtcactgccgttctaatggaggctcaacaaggtatcgaatctagttttgtttttctcgcgaatatcgtcgactcataaaaaagagaatagcggtaagtataaacacgaatactatggcaataattgcgaatgttttattctcttcgatatatttttgataatatgaaaaacatgtctctctcaaatcggacaaccatctcataaaatagttctcgcgcgctggagaggtagttgctgctcgtataatctccccagaataatatacttgcgtgtcgtcgttcaatttatacggatttctatagttctctgttatataatgcggttttccatcatgattagacgacgacaatagtgttctgaatttagatagttgatcagaatgaatgtttattggcgttggaaaaattatccatacagcgtctgcagagtggttgatagttgttcctagatatgtaaaataatccaacttactaggcagcaaattgtctagataaaatactgaatcaaacggtgcagacgtattggcggatctaatggaatccaattgattaactatcttttgaaaatatacatttttatgatccaatacttgtaagaatatagaaataatgataagtccatcatcgtgtttttttgcctcttcataagaactatattttttcttattccaatgaacaagattaatctctccagagtatttgtacacatctatcaagtgattggatccataatcgtcttcctttccccaatatatatgtagtgatgataacacatattcattggggagaaaccctccacttatatatcctcctttaaaattaatccttactagttttccagtgttctggatagtggttggtttcgactcattataatgtatgtctaacggcttcaatcgcgcgttagaaattgcttttttagtttctatattaataggagatagttgttgcggcatagtaaaaatgaaatgataactgtttaaaaatagctcttagtatgggaattacaatggatgaggaagtgatatttgaaactcctagagaattaatatctattaaacgaataaaagatattccaagatcaaaagacacgcacgtgtttgctgcgtgtataacaagtgacggatatccgttaataggagctagaagaacttcattcgcgttccaggcgatattatctcaacaaaattcagattctatctttagagtatccactaaactattacggtttatgtactacaatgaactaagagaaatctttagacggttgagaaaaggttctatcaacaatatcgatcctcactttgaagagttaatattattgggtggtaaactagataaaaaggaatctattaaagattgtttaagaagagaattaaaagaggaaagtgatgaacgtataacagtaaaagaattcggaaatgtaattctaaaacttacaacgcgcgataaattatttaataaagtatatataggttattgcatggcgtgttttattaatcaatcgttggaggatttatcgcatactagtatttacaatgtagaaattagaaagattaaatcattaaatgattgtattaacgacgataaatacgaatatctgtcttatatttataatatgctagttaatagtaaatgaacttttacagatctagtataattagtcagattattaagtataatagacgactagctaagtctattatttgcgaggatgactctcaaattattacactcacggcattcgttaaccaatgcctatggtgtcataaacgagtatccgtgtccgctattttattaactactgataacaaaatattagtatgtaacagacgagatagttttctctattctgaaataattagaactagaaacatgtttagaaagaaacgattatttctgaattattccaattatttgaacaaacaggaaagaagtatactatcgtcatttttttctctagatccagctactgctgataatgatagaatagacgctatttatccgggtggcatacccaaaaggggtgagaatgttccagagtgtttatccagggaaattaaagaagaagttaatatagacaattcttttgtattcatagacactcggttttttattcatggcatcatagaagataccattattaataaattttttgaggtaatcttctttgtcggaagaatatctctaacgagtgatcaaatcattgatacatttaaaagtaatcatgaaatcaaggatctaatatttttagatccgaattcaggtaatggactccaatacgaaattgcaaaatatgctctagatactgcaaaactcaaatgttatggccatagaggatgttattacgaatcattaaaaaaattaactgaggatgattgattagaaaatataaattaatttaccatcgtgtatttttataacgggattgtccggcatatcatgtagatagttaccgtctacatcgtatactcgaccatctacgcctttaaatcctctatttattgacattaatctattagaattggaataccaaatattagtaccctcaattagtttattggtaatatttttgttagacgatagatcgatggctcttgaaaccaaggttttccaaccggactcattgtcgatcggtgagaagtctttttcattagcatgaatccattctaatgatgtatgtttaaacactctaaacaattggacaaattcttttgatttgctttgaatgatttcaaataggtcttcgtctacagtaggcataccattagataatctagccattataaagtgcacgtttacatatctacgttctggaggagtaagaacgtgactattgagacgaatggctcttcctactatctgacgaagagacgcctcgttccatgtcatatctaaaatgaagatatcattgattgagaagaagctaataccctcgcctccactagaagagaatacgcatgttttaatgcattctccgttagtgtttgattcttggttaaactcagccaccgccttgattctagtatcttttgttctagatgagaactctatattagagataccaaagactttgaaatatagtaataagatttctattcctgactgattaacaaatggttcaaagactagacatttaccatgggatgctaatattcccaaacatacatctataaatttgacgcttttctcttttaattcagtaaatagagagatatcagccgcactagcatcccctcccaatagttctccccttttaaaggtatctaatgcagatttagaaaattctctatctcttaatgaatttttaaaatcattatatagtgttgctatctcttgcgcgtattcgcccggatcacgattttgtctttcaggaaagctatcgaacgtaaacgtagtagccatacgtctcagaattctaaatgatgatatacctgtttttatttcagcgagtttagccttttgataaatttcttcttgctttttcgacatattaacgtatcgcattaatactgttttcttagcgaatgatgcagacccttctacgtcatcaaaaatagaaaactcgttattaactatgtacgaacataggcctcctagtttggagactaattctttttcatcaactagacgtttattctcaaatagcgattggtgttgtaaggatcctggtcgtagtaagttaaccaacatggtgaattcttgcacactattgacgataggtgtagccgataaacaaatcatcttatggttttttaatgcgatggtcttagataaaaaattatatactgaacgagtaggacggatcttaccatcttctttgattaatgatttagaaatgaagttatgacattcatcaataatgacgcatattctactcttggaattaatagttttgatattagtaaaaaatttatttctaaaattttgatcatcgtaattaataaaaatacaatccttcgttatctctggagcgtatctgagtatagtgttcatccaaggatcttctatcaaagcctttttcaccaataagataatagcccaattcgtataaatatccttaagatgtttgagaatatatacagtagtcattgttttaccgacacccgtttcatggaacaataaaagagaatgcatactgtctaatcctaagaaaactcttgctacaaaatgttgataatccttgaggcgtactacgtccgaccccatcatttcaacaggcatattagtagttctgcgcaatgcataatcgatataggccgcgtgtgatttactcatttatgagtgataagtaataactatgttttaaaaatcacagcagtagtttaactagtcttctctgatgtttgttttcgatactttttgaatcagaagtcatactagaataaagcaacgagtgaacgtaatagagagcttcgtatactctattcgaaaactctaagaacttattaatgaattccgtatccactggattgtttaaaatactaaattgaacactgttcacatccttccaagaagaagacttagtgacggacttaacatgagacataaataaatccaaattttttttacaaacatcactagccaccataatggcgctatcttttaaccagctatcgcttacgcattttagcagtctaacatttttaaagagactacaatatattctcatagtatcgattacacctctaccgaataaagttggaagtttaataatacaatatttttcgtttacaaaatcaaataatggtcgaaacacgtcgaaggttaacatcttataatcgctaatgtatagattgttttcagtgagatgattattagatttaatagcatctcgttcacgtttgaacagtttattgcgtgcgctgaggtcggcaactacggcgtccgctttagtactcctcccataatactttacgctattaatctttaaaatttcatagactttatctagatcgctttctggtaacatgatatcatgtgtaaaaagttttaacatgtcggtcggcattctatttagatcattaactctagaaatctgaagaaagtaattagctccgtattccagactaggtaatgggcttttacctagagacagattaagttctggcaatgtttcataaaatggaagaaggacatgcgttccctcccggatattttttacaatttcatccatttacaactctatagtttgttttcattattattagttattatctcccataatcttggtaatacttaccccttgatcgtaagataccttatacaggtcattacatacaactaccaattgtttttgtacataatagattggatggttgacatccatggtggaataaactactcgaacagatagtttatctttccccctagatacattagccgtaatagttgtcggcctaaagaatatctttggtgtaaagttaaaagttagggttcttgttccattattgctttttgtcagtagttcattataaattctcgagatgggtccgttctctgaatatagaacatcatttccaaatctaacttctagtctagaaataatatcggtcttattcttaaaatctattcccttgatgaagggatcgttaatgaacaaatccttggcctttgattcggctgatctattatctccgttatagacgttacgttgactagtccaaagacttacaggaatagatgtatcgatgatgttgatactatgtgatatgtgagcaaagattgttctcttagtggcatcactatatgttccagtaatggcggaaaactttttagaaatgttatatataaaagaattttttcgtgttccaaacattagcagattagtatgaagataaacactcatattatcaggaacattatcaatttttacatacacatcagcatcttgaatagaaacgataccatcttctggaacctctacgatctcggcagactccggataaccagtcggtggaccatcgctaacaataactagatcatccaacaatctactcacatatgcatctatataatctttttcatcttgtgagtaccctggatacgaaataaatttattatccgtatttccataataaggtttagtataaacagagagcgatgttgccgcatgaacttcagttacagtcgccgttggttggtttatttgacctattactctcctaggtttctctataaatgatggtttaatttgtacattcttaaccatatatccaataaagctcaattcaggaacataaacaaattctttgttgaacgtttcaaagtcgaacgaagagtcacgaataacgatatcggatactggattgaaggttaccgttacggtaatttttgaatcggatagtttaagactgctgaatgtatcttccacatcaaacggagttttaatataaacgtatactgtagatggttctttaatagtgtcattaggagttaggccaatagaaatatcattaagttcactagaatatccagagtgtttcaaagcaattgtattattgatacaattattatataattcttcgccctcaatttcccaaataacaccgttacacgaagagatagatacgtgattaatacatttatatccaacatatggtacgtaaccgaatcttcccatacctttaacttctggaagttccaaactcagaaccaaatgattaagcgcagtaatatactgatccctaatttcgaagctagcgatagcctgattgtctggaccatcgtttgtcataactccggatagagaaatatattgcggcatatataaagttggaatttgactatcgactgcgaagacattagaccgtttaatagagtcatccccaccgatcaaagaattaatgatagtattattcattttctatttaaaatggaaaaagcttacaataaactccgtagagaaatatctataatttgtgagttttccttaaagtaacagcttccgtaaacgccgtctttatctcttagtaagtttattgtatttataaccttttccttatcttcatagaatactaaaggcaacaaagaaatttttggttcttctctaagagctacgtgagacttaaccatagacgccaacgaatccctacatattttagaacagaaatacccaacttcaccacccttgaatgtctcaatactaataggtttaaaaaccaaatcttgattacaaaaccaacacttatcaattacactatttgtcttaatagacacatctgccatagatttataatactttggtagtatacaagcgagtgcttcttctttagcgggcttaaagactgctttaggtgctgaaataaccacatctggaaggcttactcgcttagccatttaattacggaactatttttttatacttctaatgagcaagtagaaaacctctcatctacaaaaacatactcgtgtccataatcctctaccatagttacacgttttttagatctcatatgtgctaaaaagttttcccatactaattggttactattatttttcgtataatttttaacagtttgaggttttagatttttagttacagaagtgatatcgaatattttatccaaaaagaatgaataattaattgtcttagaaggagtgttttcttggcaaaagaataccaagtgcttaaatatttctactacttcattaatcttttctgtactcagattcagtttctcatcttttacttgattgattatttcaaagactaacttataatcctttttatttattctctcgttagccttaagaaaactagatacaaaatttgcatctacatcatccgtggatatttgatttttttccatgatatccaagagttccgagataatttctccagaacattgatgagacaataatctccgcaatacatttctcaaatgaataagtttattagacacatggaagtttgactttttttgtacctttgtacatttttgaaataccgactcgcaaaaaatacaatattcatatccttgttcagatactataccgttgtgtctacaaccgctacataatcgtagattcatgttaacactctacgtatctcgtcgtccaatattttatataaaaacattttatttctagacgttgccagaaaatcctgtaatatttttagttttttgggctgtgaataaagtatcgccctaatattgttaccgtcttccgccaatatagtagttaaattatccgcacatgcaaaagaacaccgcttaggcggattcagtacaatgttatatttttcgtaccaactcatttaaatatcataatctaaaatagttctgtaatatgtctagcgctaatatattgatcataatcctgtgcataaattaagatacaacaatgtctcgaaatcatcgacatggcttcttccatagttagaagatcgtcgtcaaagttagcaacgtgattcatcaacatttgctgttttgaggcagcaaatactgaaccgtcgccattcaaccattcataaaaaccatcgtctgaatccattgataatttcttgtactggtttttgagagctcgcatcaatctagcatttctagctcccggattgaaaacagaaagaggatcgtacatccagggtccattttctgtaaatagaatcgtataatgtcccttcaagaagatatcagacgatccacaatcaaagaattggtctccgagtttgtaacaaactgcggactttaacctatacatgataccgtttagcatgatttctggtgatacgtcaatcggagtatcatctattagagatctaaagccggtgtaacattctccaccaaacatattcttattctgacgtcgttctacataaaacatcattgctccattaacgataacaggggaatgaacagcactacccatcacattagttcccaatggatcaatgtgtgtaactccagaacatcttccatatcctatgttaggaggagcgaacaccactcttccactattgccatcgaatgccatagaataaatatccttggaattgatagaaatcggactgtcggatgttgtgatcatcttcataggattaacaactatgtatggtgccgcctgaagtttcatatcgtaactgatgccgtttataggtctagccacagaaaccaacgtaggtctaaatccaactatagacaaaatagaagccaatatctgttcctcatctgtcataacttgagagcatccagtatgaataatcttcattagatggggatctaccgcatcatcatcgttacaataaaaaattcccattctaatgttcataattgcttttctaatcatggtatgcatgtttgctctctgaatctctgtggaaattagatctgatacacctgtaatcactatcggattatcctccgtaagacgattaaccaacaacatataattataagactttacttttctaaattcataaagttgctggattaggctataggtgtctccatgtacatacgcgttctcgagcgcaggaagtttaataccgaatagtgccatcagaataggatgaatatagtaattagtttctggttttctataaataaaagacaaatcttgtgaactagacatatcggtaaaatgcatggattggaatcgtgtagtcgacagaagaatatgatgattagatggagagtatattttatctaactctttgagttggtcaccgattctaggactagctcgagaatgaataagtactaaaggatgagtacatttcacagaaacactagcattgttcaatgtgctctttacatgggtaaggagttgaaatagctcgtttctatttgttctgacaatatttagtttattcataatgttaagcatatcctgaatagtaaagttagatgtgtcatacttgttagtagttagatatttagcaattgcattcccatcatttctcaatctcgtactccaatcatgtgtagatgctacttcgtcgatggaaaccatacaatcctttttgataggctgttgagattgattatttcctgcacgtttaggtttggtacgttgatttctagcccctgcggatataaagtcatcgtctacaatttgggacaatgaattgcatacactacaagacaaagatttatcagaagtgtgaatatgatcttcatctaccaaagaaagagtttgattagtataactagattttagtcctgcgttagatgttaaaaaaacatcgctattgaccacggcttccattatttatattcgtagtttttactcgaaagcgtgattttaatatccaatcttattacttttggaatcgttcaaaacctttgactagttgtagaatttgatctattgccctacgcgtatactcccttgcatcatatacgttcgtcaccagatcgtttgtttcggcctgaagttggtgcatatctctttcaacattcgacatgagatccttaagggccatatcgtctagattttgttgagatgctgctcctggatttggattttgttgtgctgttgtacatactgtaccaccagtaggtgtaggagtacatacagtggccacaataggaggttgaggaggtgtaaccgttggagtagtacaagaaatatttccatccgattgttgtgtacatgtagttgttggtaacgtctgagaaggttgggtagatggcggtgtcgtcgtcttttgatctttattaaatttagagataatatcctgaacagcattgctcggcgtcaacgctggaaggagtgaactcgccggcgcatcagtatcttcagacagccaatcaaaaagattagacatatcagatgatgtattagtttgttgtcgtggttttggtgtaggaacagtactactaggtagaagaataggagccggtgtagctgttggaaccggctgtggagttatatgaatagttggttgtagcggttggataggctgtctgctggcgaccgtcatattatctctagctagttgttctcgcaactgtctttgataatacgactcttgagactttagtcctatttcaatcgcttcatcctttttcgtatccggatccttttcttcagaataatagattgacgactttggtgtagaggattctgccagcccctgtgagaacttgttaaagaagtccatttaaggctttaaaattgaattgcgattataagattaaatggcagacacagacgatattatcgactatgaatccgatgatctcaccgaatacgaggatgatgaagaagaggaagaagatggagagtcactagaaactagtgatatagatcccaaatcttcttataagattgtagaatcagcatccactcatatagaagatgcgcattccaatcttaaacatatagggaatcatatatctgctcttaaacgacgctatactagacgtataagtctatttgaaatagcgggtataatagcagaaagctataacttgcttcaacgaggaagattacctctagtttcagaattttctgacgaaacgatgaagcaaaatatgctacatgtaattatacaagagatagaggagggttcttgtcctatagtcatcgaaaagaacggagaattgttgtcggtaaacgattttgacaaagatggtctaaaattccatctagactatattatcaaaatttggaaacttcaaaaacgatattagaatttatacgaatatcgttctctaaatgtcacaatcaagtctcgcatgttcagcaatttattgtcgtactttatatcgtgttcattaacgatatcttgcaaaatagtaatgattctatcttccttcgatagatattcttcagagattattgtcttatattttttcttgttatccgatatgaatttgataagactttgaacattattgatacccgtctgtttaattttttctacagatattttagttttggcagattctatcgtatctgtcaatagacatccaacatcgacattcgacgtcaattgtctataaatcaacgtataaattttagaaataacattagcgaattgttgtgcattgatgtcgttattctgaaacagtatgattttaggtagcattttcttaacaaagagaacgtatttattgttactcagttgaacagatgatatatccagattactaacgcatctgattccgtataccaaactttcagaagaaatggtgtacaattgtttgtattcattcaatgtctctttttcagaaattagtttagagtcgaatactgcaataattttcaagagatagttttcatcagataagattttatttagtgtagatatgataaaactattgttttgttggagaacttgatacgccgcgttctctgtagtcgacgctctcaaatgggaaacaatctccattatttttttggaatcggatactatatcttcggtatcttgacgcagtctagtatacatagagttaagagagattagagtttgtacattaagcaacatgtctctaaatgtggctacaaacttttcctttttcacataatctagtttattatataccgatttcacaacggcaccagatttaaggaaccagaatgaaaaactctgataactacaatatttcatcatagttacgattttatcatcttctatagttggtgtaatagcgcatacctttttctccaagactggaaccaacgtcataaaaatgtttaaatcaaaatccatatcaacatctgatgcgctaagaccagtctcgcgttcaagattatctttactaatggtgacgaactcatcatatagaactctaagtttgtccattatttatttacagatttagttgtttaatttatttgtgctcttccagagttgggatagtatttttctaacgtcggtattatattattaggatctacgttcatatgtatcataatattaatcatccacgttttgataaatctatctttagcttctgaaataacgtatttaaacaaaggagaaaaatatttagctacggcatcagacgcaataacattttttgtaaatgtaacgtatttagacgacagatcttcgttaaaaagttttccatctatgtagaatccatcggttgttaacaccattcccgcgtcagattgaataggagtttgaatagtttgttttggaaatagatccttcaataacttatagttgggtgggaaaaaatcgattttatcactagactctttcttttttactatcattacctcatgaactatttcttgaatgagtatatgtattttctttcctatatcggacgcgttcattggaaaatataccatgtcgttaactataagaatatttttatcctcgtttacaaactgaataatatcagatgtagttcgtaaacgaactatatcatcaccagcacaacatctaactatatgatatccactagtttcctttagccgtttattatcttgttccatattagcagtcattccatcatttaagaaggcgtcaaagataatagggagaaatgacattttggattctgttacgactttaccaaaattaaggatatacggacttactatctttttctcaacgtcgatttgatgaacacacgatgaaaatgtgcttctatgagattgatcatgtagaaaacaacaagggatacaatatttccgcatatcatgaaatatattaagaaatcccaccttattatatttccccaaaggatccatgcatgtaaacattatgccgttatcattaataaagacttctttctcatcggatttgtaaaagttgttactgatttttttcattccaggatctagataattaataatgatgggttttctattcttattctttgtattttggcatatcctagaccagtaaacagtttccactttggtaaaatcagcagacttttgaacgctattaaacatggcattaatggcaataactaaaaatgtaaaatatttttctatgttaggaatatggtttttcactttaatagatatatggtttttggccaaaatgatagatatttttttatccgaggatagtaaaatattattagtcgccgtctctataaaaatgaagctagtctcgatatccaattttattctagaattgataggagtcgccaaatgtaccttatacgttatatctcccttgatgcgttccatttgtgtatctatatcggacacaagatctgtaaatagttttacgttattaatcatcacggtatcgccgtcgctagataacgctaatgtaccatccaagtcccaaatggagagatttaactgttcatcgtttagaataaaatgattaccggtcatattaataaagtgttcatcgtatctagataacaacgacttataattaatgtccaagtcttgaactcgctgaatgatcttttttaacccagttagttttagattggtacgaaatatattgttaaactttgattctacagtaatgtccaaatctagttgtggaaatacttccatcaacattgtttcaaacttgataatattattatctacatcttcatacgatccaaattccggaatagatgtatcacatgctcttgccacccagataaccaaaaagtcacacgctccaggatatacattgtataaaaagctatcgttttttagtagtgtttttttctgagtatatacgaagggattaaaaatagtattatcaacgtaactatattccaaattattcttatgagaatagataataatatcgtccttaatatctaacaaatttcctaaatatccctttaattgagtcattcgaagcgtcaatagaatatgtctcttaactatttccggctgttgtatatttaaatgacttcgtaaaaaataatatatgggcgacttctcatctatgtaatcatatggagtgagatatagggctcgttctacctcctgccccttacccacctgtaataccaattgcggacttactatatatcgcatatttatatcgtggggtaaagtgaaaatctactaccgatgatgtaagtcttacaatgttcgaaccagtaccagatcttaatttggaggcctccgtagaactaggggaggtaaatatagatcaaacaacacctatgataaaggaaaatagcggttttatatcccgtagtagacgtctattcgcccatagatctaaggatgatgagagaaaactagcactacgattctttttacaaagactttattttttagatcatagagagattcattatttgttcagatgcgttgacgctgtaaaagacgtcactattaccaaaaaaaataacattatcgtggcgccttatatagcacttttaactatcgcatcaaaaggatgcaaacttacagaaacaatgattgaagcattttttccagaactatataatgaacatagtaagaaatttaaattcaactctcaagtatccatcatccaagaaaaactcggataccagtttggaaactatcacgtttatgattttgaaccgtattactctacagtagctctggctattcgagatgaacattcatctggcatttttaatatccgtcaagagagttatctggtaagttcattatctgaaataacatatagattttatctaattaatctaaaatctgatcttgttcaatggagtgctagtacgggcgctgtaattaatcaaatggtaaatactgtattgattacagtgtatgaaaagttacaactggtcatagaaaatgattcacaatttacatgttcattggctgtggaatcaaaacttccaataaaattacttaaagatagaaatgaattatttacaaaattcattaacgagttaaaaaagaccagttcattcaagataagcaaacgcgataaggatacgctactaaaatattttacttaggactggagttagaatttatagacgactcatttcgtttatcattgttactattattactattactatcattattagtgttggcattattagtattcttcttgtcatcttgttcagaaatatacagcaatgctatacctaatactaaatacattatcatgctcgcaatggctctaacaacaacgaaccaaaatgaatttggtcgtagcttttgttcacaaaaatacataaagaaatgtctacataaatctatggcgccattggctacttgaaatagcgccagtcctcctacagattttaatatagctgtataacatgacatttattcatcatcaaaagagacagagtcaccatctgtcatatttagattttttttcatgtgttcaaagtatcctctactcatttcattataatagtttatcatacttagaattttaggacggatcaatgagtaagacttgactagatcgtcagtagtaatttgtgcatcgtctattctgcatccgcttcgtcgaataatgtatagcatcgctttgagattctccatagctatcaagtctttatacaatgacatggaaatatctgtgaatactttatacttctccaacatcgatgccttaacatcatcgcctactttagcattgaaaatacgttctattgtgtagatggatgtagcaagatttttaaacaacaatgccatcttacacgatgattgcctcaagtctccaatcttttgtttagaacgattagctacagagttcaacgcttggctgactagcatattattatctttagaaattgtattcttcaatgaggcgtttatcatatctgtgatttcgttagtcatattacagtctgactgggttgtaatgttatccaacatatcacctatggatacggtacacgtaccagcatttgtaataatcctatctaagatgttgtatggcattgcgcagaaaatatcttctcctgtaatatctccactctcgataaatctactcagattattcttaaatgccttattctctggagaaaagatatcagtgtccatcatttcattaatagtatacgcagaaaagataccacgagtatcaattctatccaagatacttatcggttccgagtcacagataatggtttcctctccttcgggagatcctgcatagaaatatctaggacaatagtttctatactgtctgtaactctgataatctctaaagtcactaactgataccatgaaattgagaagatcaaacgctgaagtaatcaatttttctgcctcgtttttactacaactagttttcatcaatgtagcgacgatgtattgtttagttactcttggtctaatactgatgatagagatattattgcttcccataatggatcttctagtagtcaccttaaagcccattgatgcgaatagcagatagataaagtcttggtatgactcctttctaatatagtacggactacctttgtcacccaactttatacccacataagccataacaacctctttaatagccgtttcatgaggtttatcagccatgagcctgagtagttggaagaatctcatgaatcccgtctcagaaagtcctatatgcatgatagatttatctttcctgggaaactctcgtatagtcatagatgaaatactcttcaaagtttctgaaataagattagtaacagtcttacctccgactactctgggtaacaaacatactctaataggtgttttctctgcggagataatatcagaaaggatagagcaataagtagtattattgtgattataaagaccgaatacataacaggtagaatttataaacatcatgtcctgaaggtttttagacttgtattcctcgtaatccataccgtcccaaaacatggatttggtaactttgatagccgtagatctttgttccttcgccaacaggttaaagaaattaataaagaatttgttgtttctatttatgtccacaaattgcacgtttggaagcgccacggttacattcactgcagcattttgaggatcgcgagtatgaagtacgatgttattgtttactggtatatctggaaagaaatctaccagtctaggaataagagattgatatcgcatagaaatagtaaagtttataatctcatcatcgaagagcattttgttaccattgtaataaatatccactctgtcatatgtataaatgaagtactgttcaaacatgatgagatgtttatatgttggcatagtagtgagatcgacgtttggtaatggcaatgtattaagattaactccataatgtctagcagcatctgcgatgttataagcgtcgtcaaagcggggtcgatcttgtattgttatatattgtctaacacctataagattatcaaaatcttgtctgcttaatacaccgttaacaatttttgccttgaattcttttattggtgcattaataacatccttatagaggatgttaaacaaataagtgttatcaaagttaagatctggatatttcttttctgctagaacatccattgagtcggagccatctggtttaatataaccaccgataaatctagctctgtattctgtatccgtcaatctaatattaagaaggtgttgagtgaaaggtggaagatcgtaaaagctgtgagtattaatgataggattagtttccgaactaatgttaattggggtattaataatatctatatttccagcgttaagtgtaacattaaacagttttaattcacgtgacgtggtatcaattaaataattaatgcccaatttggatatagcagcctgaagctcatcttgtttagttacggatcctaatgagttattaagcaatatatcgaacggatgaacgaaggttgttttaagttggtcacatactttgtaatctagacatagatgcggaagaacggtagaaactatacgaaataaatattcagagtcctctaattgatcaagagtaactattgacttaataggcatcatttatttagtattaaatgacgaccgtaccagtgacggatatacaaaacgatttaattacagagttttcagaagataattatccatctaacaaaaattatgaaataactcttcgtcaaatgtctattctaactcacgttaacaacgtggtagatagagaacataatgccgccgtagtgtcatctccagaggaaatatcctcacaacttaatgaagatctatttccagatgatgattcaccggccactattatcgaacgagtacaacctcatactactattattgacgatactccacctcctacttttcgtagagagttattgatatcggaacaacgtcaacaacgagaaaaaagatttaatattacagtatcgaaaaatgctgaagcaataatggaatctagatctatgataacttctatgccaacacaaacaccatccttgggagtagtttatgataaagataaaagaattcagatgttggaggatgaagtggttaatcttagaaatcaacgatctaatacaaaatcatctgataatttagataattttaccaaaatactatttggtaagactccgtataaatcaacagaagttaataagcgtatagccatcgttaattatgcaaatttgaacgggtctcccttatcagtcgaggacttggatgtttgttcagaggatgaaatagatagaatctataaaacgattaaacaatatcacgaaagtagaaaacaaaaaattatcgtcactaacgtgattattattgtcataaacattatcgagcaagcattgctaaaactcggatttgaagaaatcaaaggactgagtaccgatatcacttcagaaattatcgatgtggagatcggagatgactgcgatgctgtagcatcaaaactaggaatcggtaacagtccggttcttaatattgtattgtttatactcaagatattcgttaaacgaattaaaattatttaatttaatacattcccatatccagacaacaatcgtctggattaatctgttcctgtcgtctcataccggacgacatattaatctttttattagtaggcatctttttagatggtttctttttcccagcattaactgagtcgatacctagaagatcgtgattgatctctccgaccattccacgaacttctaattggccgtctctaacggtaccataaactattttaccagcattagtaacagcttggacaatctgaccatccatcgcattgtacgatgtagtagtaactgttgttctacgtctaggagcaccagaagtatttttggagcccttggaggctgatgtagaagaagacgaggattttgattttggtttacatgtaatacattttgaactctttgattttgtatcacatgcgccggcagtcacatctgtttgagaattaagattattgttgcctcctttgacggctgcatctccaccgatttgcgctagtagatttttaagctgtggtgtaatcttattaactgtttcgatataatcatcgtaactgcttctaacggctaaattttttttatccgccatttagaagctaaaaatatttttatttatacagaagatttaactagattatacaatgaactaatatgatccttttccagattatttacaaacttggtattttttggttctggaggaggcgaatttaaattcggacttggattcggattttgtgagttcttgatcttattatacatcgagtataggatggcgacggtaactgctacacaaataccgatcaacaaaagaataccaatcatttattgacaataacttcactattgatcaagtatgcaatatatcatcttttcactaaataagtagtaataatgattcaacaatgtcgagatatatggacgataataatttagttcatggaaatatcgctatgattggtatgaatgactccgctaactctgtggggcgcgcagtgctttccccacatagaataaattagcattccgactgtgataataataccaagtataaacgccataatactcaatactttccatgtacgagtgggactggtagacttactaaagtcaataaaggcgaagatacacgaaagaatcaaaagaatgattccagcgattagcacgccggaaaaataatttccaatcataagcatcatgtccatttaactaataaaaattttaaatcgccgaatgaacaaagtggaatataaaccatataaaaacaatagtttgtactgcaaaaataatatctatttttgttttcgaagatatggtaaaattaaatagtagtacacagcatgttataactaacagcagcaacggctcgtaattacttatcatttactagacgaaaaggtggtgggatattttcttgctcaaataatacgaatatatcacccatccattttatgcgatgtttatatactctaatctttaatagatctatagacgacgggtttaccaacaatatagattttatcgattcatctaatttaaacccttccttaaacgtgaatgatctattatctggcataacgatgaccctacctgatgaatcggacaatgtactgggccatgtagaataaattatcaacgaattatcgtctacgaacatttatatcatttgttttaattttaggacgcgaataaatagatataaaatagaaaataacagatattacaaccagtgttatggccgcgcccaaccaggtaggcagttttattttatcttttactacaggttctcctggatgtacgtcaccaacggcggacgtagttctagtacaattagacgtaagttccgcttgggaattttttaacgctaaagagttaacgttaatcgtgcacccaacgtatttacatctagttctttgaacatcttgattataatataaccattttctatctctagattcgtcggtgcactcatgtaaccaacataccctaggtcctaaatatttatctccggaattagattttggataattcgcgcaccaacaatttctatttcctttatgatcgttacaaaagacgtataatgccgtatccccaaaagtaaaataatcaggacgaataattctaataaactcagaacaatatctcgcatccatatgtttggagcaaatatcggaataagtagacatagccggtttccgttttgcacgtaaccattctaaacaattggggtttccaggatcgtttctacaaaatccagtcatgaaatcgtcacaatgttctgtcttgtaattattattaaatatttttggacagtgtttggtatttgtcttagaacaacattttgccacgctatcactatcgcccaggagataatccttttttataaaatgacatcgttgcccggatgctatataatcagtagcgtgttttaaatccttaatatattcaggagttacctcgttctgataatagattaatgatccaggacgaaatttgaaagaactacatggttctccatgaattaatacatattgtttagcaaattcaggaactataaaactactacaatgatctatcgacataccatctatcaaacaaaacttgggtttaatttctcccggagatgtttcataatagtacgtataactttcttctgcaaacttaacagctctattatattcaggataattaaaacctaattccatatatttgtctcgtatatctgctattcctggtgctattttgattctattaagagtaacagctgcccccattcttaataatcgtcagtatttaaactgttaaatgttggtatatcaacatctaccttatttcccgcagtataaggtttgttgcaggtatactgttcaggaatggttacatttatacttcttctatagtcctgtctttcgatgttcatcacatatgcaaagaacagaataaacaaaataatgtaagaaataatattaaatatctgtgaattcgtaaatacattgattgccataataattacagcagctacaatacacacaatagacattcccacagtgttgccattacctccacgatacatttgagttactaagcaataggtaataactaagctagtaagaggcaatagaaaagatgagataaatatcatcaatatagagattagaggagggctatatagagccaagacgaacaaaatcaaaccgagtaacgttctaacatcattatttttgaagattcccaaataatcattcattcctccataatcgttttgcatcatacctccatctttaggcataaacgattgctgctgttcctctgtaaataaatctttatcaagcactccagcacccgcagagaagtcgtcaagcatattgtaatatcttaaataactcatttatatattaaaaaatgtcactattaaagatggagtataatctttatgccgaactaaaaaaaatgacttgtggtcaacccctaagtctttttaacgaagacggggatttcgtagaagttgaaccgggatcatcctttaagtttctgatacctaagggattttacgcctctccttccgtaaagacgagtctagtatttgaaacattaacaacgaccgataataaaatcactagtatcaatccaacaaatgcgccaaagttatatcctcttcaacgcaaagtcgtatctgaagtagtttctaatatgaggaaaatgatcgaatcaaaacgtcctctatacattactcttcacttggcgtgtggatttggtaagactattaccacgtgttatcttatggctacacacggtagaaaaaccgtcatttgcgtacccaataaaatgttaatacatcaatggaagacacaggtagaggcagtcggattggaacataagatatccatagatggagtaagtagtctattaaaggaactaaagactcaaagtccggatgtattaatagtagtcagtagacatctgacaaacgatgccttttgtaaatatatcaataagcattatgatttgttcatcttggatgaatcacatacgtataatctgatgaacaatacagcagttacaagatttttagcgtattatcctccgatgatgtgttattttttaactgctacacctagaccagctaaccgaatttattgtaacagtattattaatattgccaagttatccgatctaaaaaaaactatctatgcggtagatagtttttttgagccatattccacagacaatattagacatatggtaaaacgactagatggaccatctaataaatatcatatatataccgagaagttattatctgtagacgagcctagaaatcaacttattcttaataccctggtagaagaattcaagtcaggaactattaatcgcattttagttattactaaactacgtgaacatatggtattattctacaaacgattattagatcttttcggaccagaggttgtatttataggagacgcccaaaatagacgtactccagatatggtcaaatcaatcaaggaactaaatagatttatattcgtatccaccttattttattccggtactggtttagatattcctagtttggattcgttgttcatttgctcggcagtaatcaacaatatgcaaatagagcaattactagggagggtatgtcgagaaacagaactattagataggacggtatatgtatttcctaacacatccatcaaagaaataaagtacatgataggaaatttcatgcaacgaattattagtctgtctgtagataaactaggatttaaacaagaaagttatcggaaacatcaagaatccgatcccacttctgtatgtacaacatcctccagagaagaacgtgtattaaatagaatatttaactcgcaaaatcgttaagaagtttaagcgacgatccgcatgctgcgcaggccagtgtattacccctcatagtattaatataatccaatgatacttttgtgatgtcggaaatcttaaccaatttagactgacaggcagaacacgtcatgcaatcatcatcgtcatcgataactgtagtcttgggcttctttttgcggctcttcattccggaacgcacattggtgctatccatttaggtagtaaaaaataagtcagaatatgccctataacacgatcgtgcaaaacctggtatatcgtctctatctttatcacaatatagtgtatcgacatctttattattattgacctcgtttatcttggaacatggaatgggaacatttttgttatcaacggccacctttgccttaattccagatgttgtaaaattataactaaacagtctatcatcgacacaaatgaaattcttgtttagacgtttgtagtttacgtatgcggctcgttcgcgtctcattttttcagatattgcaggtactataatattaaaaataagaatgaaataacataggattaaaaataaagttatcatgacttctagcgctgatttaactaacttaaaagaattacttagtctgtacaaaagtttgaaattttcagattctgcggctatagaaaagtataattctttggtagaatggggaacatctacttactggaaaataggcgtgcaaaaggtagctaatgtcgagacgtcaatatctgattattatgatgaggtaaaaaataaaccgtttaatattgatccgggctattacattttcttaccggtatattttgggagcgtctttatttattcgaagggtaaaaatatggtagaacttggatctggaaactcttttcaaataccagatgatatgcgaagtgcgtgtaacaaagtattagacagcgataacggaatagactttctgagatttgttttgttaaacaatagatggataatggaagatgctatatcaaaatatcagtctccagttaatatatttaaactagctagtgagtacggattaaacatacccaaatatttagaaattgaaatagaggaagacacattatttgacgacgagttatactctattatagaacgctcttttgatgataaatttccaaaaatatccatatcgtatattaagttgggagaacttaggcggcaagttgtagactttttcaaattctcgttcatgtatattgagtccatcaaggtagatcgtataggagataatatttttattcctagcgttataacaaaatcaggaaaaaagatattagtaaaagatgtagaccatttaatacgatctaaggttagagaacatacatttgtaaaagtaaaaaagaaaaacacattttccattttatacgactatgatgggaacggaacagaaactagaggagaagtaataaaacgaattatagacactataggacgagactattatgttaacggaaagtatttctctaaggttggtagtgcaggcttaaagcaattgactaataaattagatattaatgagtgcgcaactgtcgatgagttagttgatgagattaataaatccggaactgtaaaacgaaaaataaaaaaccaatcagcatttgatttaagcagagaatgtttgggatatccagaagcagattttataacgttagttaataacatgcggttcaaaatagaaaattgtaaggttgtaaatttcaatattgaaaatactaattgtttaaataacccgagtattgaaactatatatggaaactttaaccagttcgtctcaatctttaatatcgtcaccgatgtcaaaaaaagattattcgagtgaaataatatgcgcctttgatataggtgcaaaaaatcctgccagaactgttttagaagtcaaggataactccgttagggtattggatatatcaaaattagactggagttctgattgggaaaggcgcatagctaaagatttgtcacaatatgaatacactacagttcttctagaacgtcagcctagaaggtcgccgtatgttaaatttatctattttattaaaggctttttatatcatacatcggctgccaaagttatttgcgtctcgcctgtcatgtctggtaattcatatagagatcgaaaaaagagatcggtcgaagcatttcttgattggatggacacattcggattgcgagactccgttccggatagacgcaaattagacgatgtagcggatagtttcaatttggctatgagatacgtattagataaatggaatactaattatacaccttataataggtgtaaatctagaaattacataaaaaaaatgtaataacgttagtaacgccattatggataatctatttacctttctacatgaaatagaagatagatatgccagaactatttttaactttcatctaataagttgcgatgaaataggagatatatatggtcttatgaaagaacgcatttcctcagaggatatgtttgataatatagtatataataaagatatacatcctgccattaagaaactagtgtattgcgacatccaacttactaaacacattattaatcagaatacgtatccggtatttaacgattcttcacaagtgaaatgttgtcattatttcgacataaactcagataatagcaatattagctctcgtacagtagagatatttgagagggaaaagtcatctcttgtatcatatattaaaactaccaataagaagagaaaggtcaattacggcgaaataaagaaaactgttcatggaggcactaatgcaaattacttttccggtaaaaagtctgacgagtatctgagtactacagttagatccaacattaatcaaccttggatcaaaaccatttctaagagaatgagagtagatatcattaatcactctatagtaacgcgtggaaaaagctctatattacaaactatagaaattatttttactaatagaacatgtgtgaaaatattcaaggattctactatgcacattattctatccaaggacaaggatgaaaaggggtgtatacacatgattgacaaattattctatgtctattataatttatttctgttgttcgaagatatcatccaaaacgagtactttaaagaagtagctaatgttgtaaaccacgtacttacggctacggcattagatgagaaattattcctaattaagaaaatggctgaacacgatgtttatggagttagcaatttcaaaatagggatgtttaacctgacatttattaagtcgttggatcataccgttttcccctctctgttagatgaggatagcaaaataaagttttttaaggggaaaaagctcaatattgtagcattacgatctctggaggattgtataaattacgtgactaaatccgagaatatgatagaaatgatgaaggaaagatcgactattttaaatagcatagatatagaaacggaatcggtagatcgtctaaaagaattgcttctaaaatgaaaaaaaacactgattcagaaatggatcaacgactagggtataagtttttggtgcctgatcctaaagccggagttttttatagaccgttacatttccaatatgtatcgtattctaattttatattgcatcgattgcatgaaatcttgaccgtcaagcggccactcttatcgtttaagaataatacagaacgaattatgatagaaattagcaatgttaaagtgactcctccagattactcacctataatcgcgagtattaaaggtaagagttatgatgcattagccacgttcactgtaaatatctttttttctagacactaaataaaatatttaaaatataatattaatgtactaaaacttatatattattaatttatctaactaaagttagtaaattatatatataattttataattaatttaattttactaattttatttagtgtctagaaaaaaa

SEQ ID NO: 18 - DNA, 66390 bp, Artificial Sequence
  sVAC fragment 2
tttttttctagacactaaataaaatatttaaaatataatattaatgtactaaaacttatatattattaatttatctaactaaagttagtaaattatatatataattttataattaatttaattttactaattttatttagtgtctagaaaaaaaattttgggagcgtctttatttattcgaagggtaaaaatatggtagaacttggatctggaaactcttttcaaataccagatgatatgcgaagtgcgtgtaacaaagtattagacagcgataacggaatagactttctgagatttgttttgttaaacaatagatggataatggaagatgctatatcaaaatatcagtctccagttaatatatttaaactagctagtgagtacggattaaacatacccaaatatttagaaattgaaatagaggaagacacattatttgacgacgagttatactctattatagaacgctcttttgatgataaatttccaaaaatatccatatcgtatattaagttgggagaacttaggcggcaagttgtagactttttcaaattctcgttcatgtatattgagtccatcaaggtagatcgtataggagataatatttttattcctagcgttataacaaaatcaggaaaaaagatattagtaaaagatgtagaccatttaatacgatctaaggttagagaacatacatttgtaaaagtaaaaaagaaaaacacattttccattttatacgactatgatgggaacggaacagaaactagaggagaagtaataaaacgaattatagacactataggacgagactattatgttaacggaaagtatttctctaaggttggtagtgcaggcttaaagcaattgactaataaattagatattaatgagtgcgcaactgtcgatgagttagttgatgagattaataaatccggaactgtaaaacgaaaaataaaaaaccaatcagcatttgatttaagcagagaatgtttgggatatccagaagcagattttataacgttagttaataacatgcggttcaaaatagaaaattgtaaggttgtaaatttcaatattgaaaatactaattgtttaaataacccgagtattgaaactatatatggaaactttaaccagttcgtctcaatctttaatatcgtcaccgatgtcaaaaaaagattattcgagtgaaataatatgcgcctttgatataggtgcaaaaaatcctgccagaactgttttagaagtcaaggataactccgttagggtattggatatatcaaaattagactggagttctgattgggaaaggcgcatagctaaagatttgtcacaatatgaatacactacagttcttctagaacgtcagcctagaaggtcgccgtatgttaaatttatctattttattaaaggctttttatatcatacatcggctgccaaagttatttgcgtctcgcctgtcatgtctggtaattcatatagagatcgaaaaaagagatcggtcgaagcatttcttgattggatggacacattcggattgcgagactccgttccggatagacgcaaattagacgatgtagcggatagtttcaatttggctatgagatacgtattagataaatggaatactaattatacaccttataataggtgtaaatctagaaattacataaaaaaaatgtaataacgttagtaacgccattatggataatctatttacctttctacatgaaatagaagatagatatgccagaactatttttaactttcatctaataagttgcgatgaaataggagatatatatggtcttatgaaagaacgcatttcctcagaggatatgtttgataatatagtatataataaagatatacatcctgccattaagaaactagtgtattgcgacatccaacttactaaacacattattaatcagaatacgtatccggtatttaacgattcttcacaagtgaaatgttgtcattatttcgacataaactcagataatagcaatattagctctcgtacagtagagatatttgagagggaaaagtcatctcttgtatcatatattaaaactaccaataagaagagaaaggtcaattacggcgaaataaagaaaactgttcatggaggcactaatgcaaattacttttccggtaaaaagtctgacgagtatctgagtactacagttagatccaacattaatcaaccttggatcaaaaccatttctaagagaatgagagtagatatcattaatcactctatagtaacgcgtggaaaaagctctatattacaaactatagaaattatttttactaatagaacatgtgtgaaaatattcaaggattctactatgcacattattctatccaaggacaaggatgaaaaggggtgtatacacatgattgacaaattattctatgtctattataatttatttctgttgttcgaagatatcatccaaaacgagtactttaaagaagtagctaatgttgtaaaccacgtacttacggctacggcattagatgagaaattattcctaattaagaaaatggctgaacacgatgtttatggagttagcaatttcaaaatagggatgtttaacctgacatttattaagtcgttggatcataccgttttcccctctctgttagatgaggatagcaaaataaagttttttaaggggaaaaagctcaatattgtagcattacgatctctggaggattgtataaattacgtgactaaatccgagaatatgatagaaatgatgaaggaaagatcgactattttaaatagcatagatatagaaacggaatcggtagatcgtctaaaagaattgcttctaaaatgaaaaaaaacactgattcagaaatggatcaacgactagggtataagtttttggtgcctgatcctaaagccggagttttttatagaccgttacatttccaatatgtatcgtattctaattttatattgcatcgattgcatgaaatcttgaccgtcaagcggccactcttatcgtttaagaataatacagaacgaattatgatagaaattagcaatgttaaagtgactcctccagattactcacctataatcgcgagtattaaaggtaagagttatgatgcattagccacgttcactgtaaatatctttaaagaggtaatgaccaaagagggtatatccatcactaaaataagtagttatgagggaaaagattctcatttgataaaaattccgctactaataggatacgggaataaaaatccacttgatacagccaagtatcttgttcctaatgtcataggtggagtctttatcaataaacaatctgtcgaaaaagtaggaattaatctagtagaaaagattacaacatggccaaaatttagggttgttaagccaaactcattcactttctcgttttcctccgtatcccctcctaatgtattaccgacaagatatcgccattacaagatatctctggatatatcacaattggaagcgttgaatatatcatcgacaaagacatttataacggtcaatattgttttgctgtctcaatatttatctagagtgagtctagaattcattagacgtagtttatcatacgatatgcctccagaagttgtctatctagtaaacgcgataatagatagtgctaaacgaattactgaatctattactgactttaatattgatacatacattaatgacctggtggaagctgaacacattaaacaaaaatctcagttaacgatcaacgagttcaaatatgaaatgctgcataactttttacctcatatgaactatacacccgatcaactaaagggattttatatgatatctttactaagaaagtttctctactgtatctaccacacttctagatatccagatagagattcgatggtttgtcatcgcatcctaacgtacggcaaatattttgagacgttggcacatgatgaattagagaattacataggcaacatccgaaacgatatcatgaacaatcacaagaacagaggcacttacgcggtaaacattcatgtactaacaactcccggacttaatcacgcgttttctagcttattgagtggaaagttcaaaaagtcagacggtagttatcgaacacatcctcactattcatggatgcagaatatttctattcctaggagtgttggattttatccggatcaagtaaagatttcaaagatgttttctgtcagaaaataccatccaagtcaatatctttacttttgttcatcggacgttccggaaagaggtcctcaggtaggtttagtatctcaattgtctgtcttgagttccattacaaatatactaacgtctgagtatttggatttggaaaagaaaatttgtgagtatatcagatcatattataaagatgatataagttactttgaaacaggatttccaatcactatagaaaatgctctagtcgcatctcttaatccaaatatgatatgtgattttgtaactgactttagacgtagaaaacggatgggattcttcggtaacttggaggtaggtattactttagttagggatcacatgaatgaaattcgcattaatattggagcgggaagattagtcagaccattcttggttgtggataacggagagctcatgatggatgtgtgtccggagttagaaagcagattagacgacatgacattctctgacattcagaaagagtttccgcatgtcatcgaaatggtagatatagaacaatttacttttagtaacgtatgtgaatcggttcaaaaatttagaatgatgtcaaaggatgaaagaaagcaatacgatttatgtgactttcctgccgaatttagagatggatatgtggcatcttcattagtgggaatcaatcacaattctggacccagagctattcttggatgtgctcaagctaaacaagctatctcttgtctgagttcggatatacgaaataaaatagacaatggaattcatttgatgtatccagagaggccaatcgtgattagtaaggctttagaaacttcaaagattgcggctaattgcttcggccaacatgttactatagcattaatgtcgtacaaaggtatcaatcaagaggatggaattatcatcaaaaaacaatttattcagagaggcggtctcgatatagttaccgcaaagaaacatcaagtagaaattccgttggaaaactttaataacaaagaaagagataggtctaacgcctattcaaaattagaaagtaatggattagttagactgaatgctttcttggaatccggagacgctatggcacgaaatatctcatcaagaactcttgaagatgattttgctagagataatcagattagcttcgatgtttccgagaaatataccgatatgtacaaatctcgcgttgaacgagtacaagtagaacttactgacaaagttaaggtacgagtattaaccatgaaagaaagaagacccattctaggagataaatttaccactagaacgagtcaaaagggaacagtcgcgtatgtcgcggatgaaacggaacttccatacgacgaaaatggtatcacaccagatgtcattattaattctacatccatcttctctagaaaaactatatctatgttgatagaggttattttaacagccgcatattctgctaagccgtacaacaataagggagaaaaccgacctgtctgttttcctagtagtaacgaaacatccatcgatacatatatgcaattcgctaaacaatgttatgagcattcaaatccgaaattgtccgatgaagaattatcggataaaatcttttgtgaaaagattctctatgatcctgaaacggataagccttatgcatccaaagtattttttggaccaatttattacttgcgtctgaggcatttaactcaggacaaggcaaccgttagatgtagaggtaaaaagacgaagctcattagacaggcgaatgagggacgaaaacgtggaggaggtatcaagttcggagaaatggagagagactgtttaatagcgcatggcgcagccaatactattacagaagttttaaaagactcagaagaggattatcaagatgtgtatgtttgtgaaaattgtggagacatagcagcacaaatcaagggtattaatacatgtcttagatgttcaaaacttaatctctctcctctcttaacaaaaattgataccacgcacgtatctaaagtatttcttactcaaatgaacgccagaggcgtaaaagtcaaattagatttcgaacgaaggcctccttcgttttataaaccattagataaagttgatctcaagccgtcttttctggtgtaatattctagtttggtagtagatacatatcaatatcatcaaattcgagatccgaattataaaatgggcgtggattgttaactatagaatcggacgtctgatattcgaaaatctgtggagttttaggttttggtggaggtgtaactgctacttgggatactgaagtctgatattcagaaagctgggggatgttctggttcgacatccaccgatggtgtcacatcactaatcggttcggtaacgtctgtggatggaggtgctacttctacagaacctgtagcctcagttgtcaacggagatacatttttaatgcgaggaaatgtataatttggtaatggtttctcatgtggatctgaagaagaggtaagatatctactagaaagataccgatcacgttctagttctcttttgtagaacttaactttttctttctcagcatctagttgatattccaacctcttcacgttactacgttcagattccaattcacgttcgcatgggttacctccgcagtttttacgagcgatttcacgttcagccttcatgcgtctctccttctctctatcgagtttatcagagcagtctttctgaaggcgatcgaactccataaatttctccaacgctttgattgtttccatagatttccgaagttcagcttttaggactgtgattctttttctttcgaattcacagctggatgtgcaaccgtttccattaccgccatctctaagtttcttttctagatcggcaacatttcatccccatgccttttacattcctcgagtctactgtcgtcgaaatatcgttccagctccttttcgacatcaataactttagcacgttgtctctcaagctctcttttgtagttatctgattccctggcacgtttaagatcttcatgcaattgagtcagctcttaacacaatctcttgcttcttcgtcatagtacttacaatcactatgggatccattgttaccacgtctacactcggcgagctcgcgtttaagagattcaatttcccgtttgtattggtccatgtttccattgctaccaccattagatttacaggctgctagttgtcgttcgagatcagaaatacgggttttcttggaattgatttcgtcgatgtacttggcatcgaaacacttattaagttctttttccaattctacgattttatttctttcgcgagtcaattccctcctgtagtaactatctgttttgtcagattcacgctctctacgtagactttcttgcaagttactaatttgttccctagcacgtccgagtttagttttatatgctgaatagagttctgattcatcctttgagcagatctctagcgatcgtttaagattcctgattctagtctttagcctatttacctcctcagaagatgttccgttaccgttgcgtttacactcgttaagctgtctatcaagatccatgattctatctctaagacgttgcatctctctttccatatcagcattgctttcattattacgtctgcagtcactcaactgtctttcaatatctgagattctatctctaagacgtcgcatctctctctgtttcggcattggtttcattattacgtctacagtcgttcaactgtctttcaagatctgatattctagattggagtctgctaatctctgtagcattttcacggcattcactcagttgtctttcaagatctgagattttagattggagtctgctaatctctgtaagatttcctcctccgctctcgatgcagtcggtcaacttattctctagttctctaatacgcgaacgcagtgcatcaacttcttgcgtgtcttcctggttgcgtgtacattcatcgagtctagattcgagatctctaacgcgtcgtcgttcttcctcaagttctctgcgtactacagaaagcgtgtccctatcttgttgatatttagcaatttctgattctagagtactgattttgcttacgtagttactaatagttgtcttggccttatcaagatcctccttgtatttgtcgcattccttgatatccctacgaagtctggacagttcccattcgacattacgacgtttatcgatttcagctcggagatcgtcatcgcgttgttttagccacatacgactgagttcaagttctcgttgacaagatccatctacttttccattcctaatagtatccagttccttttctagttctgaacgcatttctcgttccctatcaagcgattctctcaattctcggatagtcttcttatcaatttctaataaatctgaaccatcatctgtcccattttgaatatccctgtgttctttgatctcttttgtaagtcggtcgattctttcggttttataaacagaatccctttccaaagtcctaatcttactgagtttatcactaagttctgcattcaattcggtgagttttctcttggcttcttccaactctgttttaaactctccactatttccgcattcttcctcgcatttatctaaccattcaattagtttattaataactagttggtaatcagcgattcctatagccgttcttgtaattgtgggaacataattaggatcttctaatggattgtatggcttgatagcatcatctttatcattattagggggatggacaaccttaattggttggtcctcatctcctccagtagcgtgtggttcttcaataccagtgttagtaataggcttaggcaaatgcttgtcgtacgcgggcacttcctcatccatcaagtatttataatcgggttctacgtctgaatattcttttctaagagacgcgacttcgggagttagtagaagaactctgtttctgtatctatcaacgctggaatcaatactcaagttaaggatagcgaatacctcatcgtcatcatccgtatcttctgaaacaccatcatatgacatttcatgaagtctaacgtattgataaatagaatcagatttagtattaaacagatccttaacctttttagtaaacgcatatgtatattttagatctccagatttcataatatgatcacatgccttaaatgtcagtgcttccatgatataatctggaacactaatgggtgacgaaaaagatacagcaccatatgctacgttgataaataaatctgaaccactaagtagataatgattaatgttaaggaagaggaaatattcagtatatagatatgccttagcatcatatcttgtactaaacacgctaaacagtttattgatgtgatcaatttccaacagaataattagagcagcgggaataccaacaaacatattaccacatccgtattttctatgaatatcacatatcatgttaaaaaatcttgatagaagagcgaatatctcgtctgacttaatgagtcgtagttcagcagcaacataagtcataactgtaaatagaacatactttcctgtagtgttgattctagactccacatcaacaccattattaaaaatagttttatatacatctttaatctgctctccgttaatcgtcgaacgttctagtatacggaaacactttgatttcttatctgtagttaatgacttagtgatatcacgaagaatattacgaattacatttcttgtttttcttgagagacctgattcagaactcaactcatcgttccatagtttttttacctcagtggcgaaatctttggagtgcttggtacatttttcaataaggttcgtgacctccatttattataaaaaattttattcaaaacttaactacaatcgggtaattataaaatcgtagatctcccatgtggtggaatactaccatctatcgcatgtggatggacagtaggtaatggccatgggaacagtaatgtttgcatatttatctttcttgccagtattactgcatattgtcccaatgtttcgatgtgatgttctaacctatcaactgccgctgtatcacaacaatagtgtccgatgaaattaagattatgatccaatgtgtttaatatatgattatcaagtcttatacgatccgcgtcttttttgacaggatcaggttcttctacaggaagaagtttcggcctcttatgatattcatgtctgggaaacggtggtctagggtgaggctccggtatcggagtgggttttggattataatcatcatcgtctatgacatcatcttcgacttcgatatttattttgctatcttgatgatgtcctgtatcagttgcattttcagcactcgactgaatattagcgcattcattgtctattattaccatatttctaaacccaaaatgtatgtgttgaacatcagtactatcgttgatgagtcttatagcatgaattcgcttatcgttatcgggtttatcttctgtcaccttagcaattccttttttattaaactctacataatcatatccatttctattgtttgttctaatataaacgagtatagcatcattgctaaatttttcaatagtatcgaaaacagaatatcctaaaccatataatatatattcagggacactcaaactaaatgtccaggattctcctaaatacgtaaactttaatagtgcgaaatcattcaaaaatctaccacttatagatagatagtacataaatgcgtatagtagtctacctatctctttattatgaaaaccggcattacgatcatatatgtcgtgatatacctgtgatccgtttacgttaaaccataaatacatgggtgatcctataaacatgaatttatttctaattctcagagctatagttaattgaccgtgtaatatttgcttacatgcatacttgatacgctcattaataaaatttttatcattgctcgttatctcagaatcgtatatataaggagtaccatcgtgattcttaccagatattatacaaaatactatatataaaatatattgaccaacgttagtaatcatataaatgtttaacgttttaaattttgtattcaatgatccattatcatacgctagcatggtcttatgatattcattctttaaaatataatattgtgttagccattgcattggggctcctaatggagattttttattctcatccattttaggataggctttcataaagtccctaataacttcgtgaataatgtttctatgttttctactgatgcatgtatttgcttcgatttttttatcccatgtttcatctatcatagatttaaacgcagtaatgctcgcaacattaacatcttgaaccgttggtacaattccgttccataaatttataatgttcgccatttatataactcattttttgaatatacttttaattaacaaaagagttaagttactcatatgggcgccgtccagtctgaacatcaatctttttagccagagatatcatagccgctcttagagtttcagcgtgattttccaacctaaatagaacttcatcgttgcgtttacaacacttttctatttgttcaaactttgttgttacattagtaatctttttttccaaattagttagccgttgtttgagagtttcctcattgtcgtcttcatcggctttaacaattgcttcgcgtttagcctctggctttttagcagcctttgtagaaaaaaattcagttgctggaattgcaagatcgtcatctccggggaaaagagttccgtccatttaaagtacagattttagaaactgacactctgcgttatttatatttggtacaacacatggattataaatatcgatgttaataacatcagaaaatgtaaagtctatacattgttgcatcgtgttaaattttctaatggatctagtattattgggtccaacttctgcctgaaatccaaatatggaagcggatacaaaaccgtttcctggataaaccacacatctccacttttgctttacatcagaaattgtgtcgttgacatcttgaactctcctatctaatgccggtgttccacctatagattttgaatattcgaatgctgcatgagtagcattaaattccttaatattgccataattttcatatattgagtaaccctggataaaaagtaaacacaccgcagccgtcgctaccacaataaaaaaaattgatagagagttcatttataatctattagaagctgacaaaatttttttacacgcatcagacaatgctttaataaatagttcaacatctacttttgtcatatcgaaccgatggtatgattctaacctagaattacatccgaaaaagttgactatgttcatagtcattaagtcattaacaaacaacattccagactctggattataagacgatactgtttcgtcacaattacctaccttaatcatgtgattatgaatattggctattagagcaccttctaagaaatctataatatctttgaaacacgatttaaaatcaaaccacgaatatacttctacgaagaaagttagtttacccataggagaaataactataaatggagatctaaatacaaaatccggatctatgatagttttaacattattatattctctattaaatacctccacatctaaaaatgttaattttgaaactatgtcttcgtttattaccgtacctgaactaaacgctataagctctattgtttgagaactctttaaacgatattcttgaaatacatgtaacaaagtttcctttaactcggtcggtttatctaccatagttacagaatttgtatccttatctataatataataatcaaaatcgtataaagttatataattatcgcgttcagattgggatcttttcaaatagactaaaaaccccatttctctagtaagtatcttatgtatatgtttgtaaaatatcttcatggtgggaatatgctctaccgcagttagccattcctcattgacagcggtagatgtattagacaaaactattccaatgtttaacaagggccattttacgagattattaaatccttgtttgataaatgtagccaatgagggttcgagttcaacgacgattgaattctcttcccgcggatgctgcatgatgaacgacgggatgttgttcgattgatttggaattctttttcgactttttgtttatattaaatattttaaaatttatagcggatagcaattcatgtaccacggataatgtagacgcgtattgcgcatcgatatctttattattagataaatttatcaataaatgtgagaagtttgcctcgttaaggtcttccatttaaatattatataaacatttgtgtttgtatcttattcgtcttttatggaatagttttttactagtaaagctgcaattacacactttgtccgtaaaacataaatataaacaccagcttttatcaatcgttccaaaaagtcgacggcggacatttttaacatggcatctattttaaatacacttaggtttttggaaaaaacatcattttataattgtaacgattcaataactaaagaaaagattaagattaaacataagggaatgtcatttgtattttataagccaaagcattctaccgttgttaaatacttgtctggaggaggtatatatcatgatgatttggttgtattggggaaggtaacaattaataatctaaagatgatgctattttacatggatttatcatatcatggagtgacaagtagtggagcaatttacaaattgggatcgtctatcgatagactttctctaaataggactattgttacaaaagttaataattatgatgatacattttttgacgacgatgattgatcgctattgcacaattttgtttttttactttctaatatagcgtttagattctttttcatgtgcgaatattgatttactaaaatatcgatgtttaacttttgttctatgacgtccttatcagcggtatcggtacatatacgtaattcaccttcacaaaatacggagtcttcgataataatagccaatcgattattggatctagctgtctgtatcatattcaacatgtttaatatatcctttcgtttcccctttacaggcatcgatcgtagcatattttccgcgtctgagatggaaatgttaaaactacaaaaatgcgtaatgttagcccgtcctaatattggtacgtgtctataagtttggcatagtagaataatagacgtgtttaaatgccttccaaagtttaagaattctattagagtattgcattttgatagtttatcacctacatcatcaaaaataagtaaaaagtgtgctgattttttatgattttgtgcgacagcaatacatttttctatgttacttttagttcgtatcagattatattctagagattcctgactactaacgaaattaatatgatttggccaaatgtatccatcataatctgggttataaacgggtgtaaacaagaatatatgtttatattttttaactagtgtagaaaacagagatagtaaatagatagtttttccagatccagatcctcccgttaaaaccattctaaacggcatttttaataaattttctcttgaaaattgtttttcttggaaacaattcataattatatttacagttactaaattaatttgataataaatcaaaatatggaaaactaaggtcgttagtagggaggagaacaaagaaggcacatcgtgacataaataacatttattatcatgatgacaccagaaaacgacgaagagcagacatctgtgttctccgctactgtttacggagacaaaattcaaggaaagaataaacgcaaacgcgtgattggtctatgtattagaatatctatggttatttcactactatctatgattaccatgtccgcgtttctcatagtgcgcctaaatcaatgcatgtctgctaacgaggctgctattactgacgccgctgttgccgttgctgctgcatcatctactcatagaaaggttgcgtctagcactacacaatatgatcacaaagaaagctgtaatggtttatattaccagggttcttgttatatattacattcagactaccagttattctcggatgctaaagcaaattgcactgcggaatcatcaacactacccaataaatccgatgtcttgattacctggctcattgattatgttgaggatacatggggatctgatggtaatccaattacaaaaactacatccgattatcaagattctgatgtatcacaagaagttagaaagtatttttgtgttaaaacaatgaactaatatttatttttgtacattaataaatgaaatcgcttaatagacaaactgtaagtaggtttaagaagttgtcggtgccggccgctataatgatgatactctcaaccattattagtggcataggaacatttctgcattacaaagaagaactgatgcctagtgcttgcgccaatggatggatacaatacgataaacattgttatttagatactaacattaaaatgtctacagataatgcggtttatcagtgtcgtaaattacgagccagattgcctagaccggatactagacatctgagagtattgtttagtattttttataaagattattgggtaagtttaaaaaagaccaatgataaatggttagatattaataatgataaagatatagatattagtaaattaacaaattttaaacaactaaacagtacgacggatgctgaagcgtgttatatatacaagtctggaaaactggttaaaacagtatgtaaaagtactcaatctgtactatgtgttaaaaaattctacaagtgacaacaaaaaatgaattaataataagtcgttaacgtacgccgccatggacgccgcgtttgttattactccaatgggtgtgttgactataacagatacattgtatgatgatctcgatatctcaatcatggactttataggaccatacattataggtaacataaaaactgtccaaatagatgtacgggatataaaatattccgacatgcaaaaatgctactttagctataagggtaaaatagttcctcaggattctaatgatttggctagattcaacatttatagcatttgtgccgcatacagatcaaaaaataccatcatcatagcatgcgactatgatatcatgttagatatagaagataaacatcagccattttatctattcccatctattgatgtttttaacgctacaatcatagaagcgtataacctgtatacagctggagattatcatctaatcatcaatccttcagataatctgaaaatgaaattgttgtttaattcttcattctgcatatcagacggcaatggatggatcataattgatgggaaatgcaatagtaattttttatcataaaagttgtaaagtaaataataaaacaataaatattgaactagtagtacgtatattgagcaatcagaaatgatgctggtacctcttatcacggtgaccgtagttgcgggaacaatattagtatgttatatattatatatttgtaggaaaaagatacgtactgtctataatgacaataaaattatcatgacaaaattaaaaaagataaagagttctaattccagcaaatctagtaaatcaactgatagcgaatcagactgggaggatcactgtagtgctatggaacaaaacaatgacgtagataatatttctaggaatgagatattggacgatgatagcttcgctggtagtttaatatgggataacgaatccaatgtcatggcgcctagcacagaacacatttacgatagtgttgctggaagcacgctgctaataaataatgatcgtaatgaacagactatttatcagaacactacagtagtaattaatgagacggagactgttgaagtacttaatgaagataccaaacagaatcctaactattcatccaatcctttcgtaaattataataaaaccagtatttgtagcaagtcaaatccgttcattacagaactcaacaataaatttagtgagaataatccgtttagacgagcacatagcgatgattatcttaataagcaagaacaagatcatgaacacgatgatatagaatcatcggtcgtatcattggtgtgattagtttcctttttataaaattgaagtaatatttagtattattgctgccgtcacgttgtacaaatggagatattccctgtattcggcatttctaaaattagcaattttattgctaataatgactgtagatattatatagatacagaacatcaaaaaattatatctgatgagatcaatagacagatggatgaaacggtacttcttaccaacatcttaagcgtagaagttgtaaatgacaatgagatgtaccatcttattccccatagactatcgactattatactctgtattagttctgtcggaggatgtgttatctctatagataatgacatcaatgacaaaaatattctaacatttcccattgatcatgctgtaatcatatccccactgagtaaatgtgtcgtagttagcaagggtcctacaaccatattggttgttaaagcggatatacccagcaaacgattggtaacatcgtttacaaacgacatactgtatgtaaacaatctgtcactgattaattatttgccgttgtctgtattcattattagacgagtcaccgactatttggatagacacatatgcgatcagatatttgcgaataataagtggtattccattataaccatcgacgataagcaatatcctattccatcaaactgtataggtatgtcctctgccaagtacataaattctagcatcgagcaagatactttaatacatgtttgtaacctcgagcatccattcgacttagtatacaaaaaaatgcagtcgtacaattctgtacctatcaaggaacaaatattgtacggtagaattgataatataaatatgagcattagtatttctgtggattaatagatttctagtatggggatcattaatcatctctaatctctaaatacctcataaaacgaaaaaaaagctattatcaaatactgtacggaatggattcattctcttctctttttatgaaactctgttgtatatctactgataaaactggaagcaaaaaatctgataaaaagaataagaataagatcaaggattatatggaacacgattattataaaataacaatagttcctggttcctcttccacgtctactagctcgtggtattatacacatgcctagtaatagtctctttgcgttgacggaaagcagactagaaataacaggctaaaatgttcagacaccataatagttcccaacccagataataacagagtaccatcaacacattcctttaaactcaatcccaaacccaaaaccgttaaaatgtatccggccaattgatagtagataatgaggtgtacagcgcatgataatttacacagtaaccaaaatgaaaatactttagtaattataagaaatatagatggtaacgtcatcatcaacaatccaataatatgccggagagtaaacattgacggataaaacaaaaatgctccgcataactctatcatggcaataacacaaccaaatacttgtaagattcctaaattagtagaaaatacaacggatatcgatgtataagtgatctcgagaaataataagaataaagtaatgcccgtaaagataaacatcaacattgtttggtaatcattaaaccaattagtatgaagttgaactaatttcacagtagattttattccagtgttatcctcgcatgtatacgtacctggtaagatatctttatattctataatcaatgagacatcactatccgataacgaatgaagtctagcactagtatgccatttacttaatatggtcgtcttggaagttttattataagttaaaatatcatggttgtccaatttccatctaatatactttgtcggattatctatagtacacggaataatgatggtattattacatgctgtatactctatagtctttgtagatgttataatcataaaagtacagaggtatatcaacgatattctaactcttgacattttttatttatttaaaatgatacctttgttatttattttattctattttgctaacggtatcgaatggcataagtttgaaacgagtgaagaaataatttctacttacttattagacgacgtattatacacgggtgttaatggggcggtatacacattttcaaataataaactaaacaaaactggtttagctaatactaattatatcacaacatctataaaagtagaggatgcggataaggatacattagtatgcggaaccaataacggaaatcccaaatgttggaaaatagacggttcagacgacccaaaacatagaggtagaggatacgctccttatcaaaatagcaaagtaacgataatcagtcacaacggatgtgtactatctgacataaacatatcaaaagaaggaattaaacgatggagaagatttgacggaccatgtggttatgatttatacacggcggataacgtaattccaaaagatggtttacgaggagcattcgtcgataaagatggtacttatgacaaagtttacattcttttcactgatactatcggctcaaagagaattgtcaaaattccgtatatagcacaaatgtgcctaaacgacgaaggtggtccatcatcattgtctagtcatagatggtcgacgtttctcaaagtcgaattagaatgtgatatcgacggaagaagttatagacaaattattcattctagaactataaaaacagataatgatacgatactatatgtattcttcgatagtccgcattatgtacctattctatgaataccattaaacaatctttttctacgtcaaaattggaaggatatacaaagcaattgccgtctccagctcctggtatatgtctaccagctggaaaagttgttccacataccacgtttgaagtcatagaaaaatataatgtactagatgatattataaagcctttatctaaccaacctatcttcgaaggaccgtctggtgttaaatggttcgatataaaggagaaggaaaatgaacatcgggaatatagaatatacttcataaaagaaaattctatatattcgttcgatacaaaatctaaacaaactcgtagctcgcaagtcgatgcgcgactattttcagtaatggtaacttcgaaaccgttatttatagcagatatagggataggagtaggaatgccacaaatgaaaaaaatacttaaaatgtaatcttaatcgagtacaccacacgacaatgaacaaacataagacagattatgctggttatgcttgctgcgtaatatgcggtctaattgttggaattatttttacagcgacactattaaaagttgtagaacgtaaattagttcatacaccatcaatagataaaacgataaaagatgcatatattagagaagattgtcctactgactggataagctataataataaatgtatccatttatctactgatcgaaaaacctgggaggaaggacgtaatgcatgcaaagctctaaatccaaattcggatctaattaagatagagactccaaacgagttaagttttttaagaagcattagacgcggatattgggtaggagaatccgaaatattaaaccagacaaccccatataattttatagctaagaatgccacgaagaatggaactaaaaaacggaaatatatttgtagcacaacgaatactcccaaactgcattcgtgttacactatataacaattacactacatttttatcataccactacttcggttagatgttttagaaaaaaataaatatcgccgtaccgttcttgtttttataaaaataacaattaacaattatcaaattttttctttaatattttacgtggttgaccattcttggtggtaaaataatctcttagtgttggaatggaatgctgtttaatgtttccacactcatcgtatattttgacgtatgtagtcacatcgtttacgcaatagtcagactgtagttctatcatgcttcctacattagaaggaggaacagttttaaagtctcttggttttaatctattaccgttagttttcatgaaatcctttgttttatccacttcacattttaaataaatgtccactatacattcttctgttaattttactagatcgtcatgggtcatagaatttataggttccgtagtccatggatccaaactagcaaacttcgcgtatacggtatcgcgattagtgtatacaccaactgtatgaaaattaagaaaacagtttaatagatcaacagaaatatttaatcctccgtttgatacagatgcaccatatttatggattttggattcacacgttgtttgtctgaggggttcgtctagcgttgcttctacataaacttctattcccatatattctttattgtcagaatcgcataccgatttatcatcatacactgtttgaaaactaaatggtatacacatcaaaataacaaatactaacgagtacattctgcaatattgttatcgtaattggaaaaatagtgttcgagtgagttggattatgtgagtattggattgtatattttattttatattttgtaataagaataaaatgctaatgtcaagtttattccaatagatgtcttattaaaaacatatataataaataacaatggctgaatggcataaaattatcgaggatatctcaaaaaataataagttcgaggatgccgccatcgttgattacaagactacaaagaatgttctagctgctattcctaacagaacatttgccaagattaatccgggtgaaattattcctctcatcactaatcgtaatattctaaaacctcttattggtcagaaatattgtattgtatatactaactctctaatggatgagaacacgtatgctatggagttgcttactgggtacgcccctgtatctccgatcgttatagcgagaactcataccgcacttatatttttgatgggtaagccaacaacatccagacgtgacgtgtatagaacgtgtagagatcacgctacccgtgtacgcgcaactggtaattaaaataaaaagtaatattcatatgtagtgtcaattttaaatgatgatgatgaaatggataatatccatattgacgatgtcaataatgccggtattggcatacagctcatcgatttttagatttcattcagaggatgtggaattatgttatgggcatttgtattttgataggatctataatgtagtaaatataaaatataatccgcatattccatatagatataattttattaatcgcacgttaaccgtagatgaactagacgataatgtcttttttacacatggttattttttaaaacacaaatatggttcacttaatcctagtttgattgtctcattatcaggaaacttaaaatataatgatatacaatgctcagtaaatgtatcgtgtctcattaaaaatttggcaacgagtacatctactatattaacatctaaacataagacttattctctacatcggtccacgtgtattactataataggatacgattctattatatggtataaagatataaatgacaagtataatggcatctatgattttactgcaatatgtatgctaatagcgtctacattgatagtgaccatatacgtgtttaaaaaaataaaaatgaactcttaattatgctatgctattagaaatggataaaatcaaaattacggttgattcaaaaattggtaatgttgttaccatatcgtataacttggaaaagataactattgatgtcacacctaaaaagaaaaaagaaaaggatgtattattagcgcaatcagttgctgtcgaagaggcaaaagatgtcaaggtagaagaaaaaaatattatcgatattgaagatgacgatgatatggatgtagaaagcgcataatacgatctataaaaataagtatataaatactttttatttactgtactcttactgtgtagtggtgataccctactcgattatttttttaaaaaaatacttattctgattcttctagccatttccgtgttcgttcgaatgccacatcgacgttaaagataggggagtagttgaaatctagttctgcattgttggtacgcacctcaaatgtagtgttggatatcttcaacgtatagttgttgagtagtgatggttttctaaatagaattctcttcatatcattcttgcacgcgtacatttttagcatccatcttggaattctagatccttgttctattcccaatggtttcatcaatagaagattaaacatatcgtacgaacacgatggagagtaatcgtagcaaaagtaagcatttcctttaatctcagatcccggatactggatatattttgcagccaacacgtgcatccatgcaacatttcctacatatacccggctatgcaccgcgtcatcatcgactgtacgatacataatgttaccgtgttgcttacattgctcgtaaaagactttcgtcaatttgtctccttctccgtaaattccagtgggtcttaggcaacaagtatacaattttgctccattcatgattacggaattattggctttcataaccagttgctcggccatacgtttactttttgcgtatacatgtcctggtgatatatcataaagggtatgctcatggccgatgaatggatcaccgtgtttatttggtcctattgcttccatgctactagtatagatcaaatacttgattcctaggtccacacaagctgccaatatagtctgtgttccataatagtttactttcatgatttcattatcggtgtattttccaaatacatccactagagcagccgtatgaataatcagatttaccccatctagcgcttctctcaccttatcaaagtcgtttatatcacattgtatatagtttataaccttaactttcgaggttattggttgtggatcttctacaatatctatgactctgatttcttgaacatcatctgcactaattaacagttttactatatacctgcctagaaatccggcaccaccagtaaccgcgtacacggccattgctgccactcataatatcagactacttattctattttactaaataatggctgtttgtataatagaccacgataatatcagaggagttatttactttgaaccagtccatggaaaagataaagttttaggatcagttattggattaaaatccggaacgtatagtttgataattcatcgttacggagatattagtcaaggatgtgattccataggcagtccagaaatatttatcggtaacatctttgtaaacagatatggtgtagcatatgtttatttagatacagatgtaaatatatctacaattattggaaaggcgttatctatttcaaaaaatgatcagagattagcgtgtggagttattggtatttcttacataaatgaaaagataatacattttcttacaattaacgagaatggcgtttgatatatcagttaatgcgtctaaaacaataaatgcattagtttacttttctactcagcaaaataaattagtcatacgtaatgaagttaatgatacacactacactgtcgaatttgatagggacaaagtagttgacacgtttatttcatataatagacataatgacaccatagagataagaggggtgcttccagaggaaactaatattggttgcgcggttaatacgccggttagtatgacttacttgtataataagtatagttttaaactgattttagcagaatatataagacacagaaatactatatccggcaatatttattcggcattgatgacactagatgatttggctattaaacagtatggagacattgatctattatttaatgagaaacttaaagtagactccgattcgggactatttgactttgtcaactttgtaaaggatatgatatgttgtgattctagaatagtagtagctctatctagtctagtatctaaacattgggaattgacaaataaaaagtataggtgtatggcattagccgaacatatatctgatagtattccaatatctgagctatctagactacgatacaatctatgtaagtatctacgcggacacactgagagcatagaggataaatttgattattttgaagacgatgattcgtctacatgttctgccgtaaccgacagggaaacggatgtataattttttttatagcgtgaaggatatgataaaaaatataattgttgtatttatcccattccaatcaccttatatgattctgtaacacaatgaaggagtctcatagatgtatagaggtcagatactggtttgataaactgtttattccacatgagtatgtttgactttatggttagacccgcatactttaacaaatcactgaaaattggagttaggtattgacctctcagaatcagttgccgttctggaacattaaatgtattttttatgatatactccaacgcatttatgtgggcatacaacaagtcattactaatggagtattccaagagttttagttgtctagtatttaacaagagaagagatttcaacagactgtttatgaactcgaatgccgcctcattgtcgcttatattgatgatgtcgaattctcccaatatcatcaccgatgagtagctcatcttgttatcgggatccaagttttctaaagatgtcattaaaccctcgatcatgaatggatttatcatcatcgtttttatgttggacatgagcttagtccgtttgtccacatctatagacgacgatttctgaattattttatatatccctctctttaactccaggaacttgtcaggatggtctactttaatatgttctcgtctaagagatgaaaatctttggatggttgcacgcgacttttctctaaaggatgacgttgcccaagatcctctcttaaatgaatccatcttatccttggacaagatggacagtctattttccttagatggtttaatatttttgttacccatgatctataaaggtagacctaatcgtctcggatgacctatatatttattttcagttttattatacgcataaattgtaaaaaatatgttaggtttacaaaaatgtctcgtggggcattaatcgtttttgaaggattggacaaatctggaaaaacaacacaatgtatgaacatcatggaatctataccggcaaacacgataaaatatcttaactttcctcagagatccactgtcactggaaagatgatagatgactatctaactcgtaaaaaaacctataatgatcatatagttaatctattattttgtgcaaatagatgggagtttgcatcttttatacaagaacaactagaacagggaattactttaatagttgatagatacgcgttctctggagtagcgtatgccgccgctaaaggcgcgtcaatgactctcagtaagagttatgaatctggattgcctaaacccgacttagttatattcttggaatctggtagcaaagaaattaatagaaacgtcggcgaggaaatttatgaagatgttacattccaacaaaaggtattacaagaatataaaaaaatgattgaagaaggagatattcattggcaaattatttcttctgaattcgaggaagatgtaaagaaggagttgattaagaatatagttatagaggctatacacacggttactggaccagtggggcaactgtggatgtaatagtgaaattacattttttataaatagatgttagtacagtgttataaatggatgaagcatattactctggcaacttggaatcagtactcggatacgtgtccgatatgcataccgaactcgcatcaatatctcaattagttattgccaagatagaaactatagataatgatatattaaacaaggacattgtaaattttatcatgtgtagatcaaacttggataatccatttatctctttcctagatactgtatatactattatagatcaagagaactatcagaccgaattgattaattcattagacgacaatgaaattatcgattgtatagttaataagtttatgagcttttataaggataacctagaaaatatagtagatgctatcattactctaaaatatataatgaataatccagattttaaaactacgtatgccgaagtactcggttccagaatagccgatatagatattaaacaagtgatacgtgagaatatactacaattgtctaatgatatccgcgaacgatatttgtgaaaaatattaaaaaaaaatactttttttattaaatgacgtcgcttcgcgaatttagaaaattatgctgtgatatatatcacgcatcaggatataaagaaaaatctaaattaattagagactttataacagatagggatgataaatatttgatcattaagctattgcttcccggattagacgatagaatttataacatgaacgataaacaaattataaaattatatagtataatatttaaacaatctcaggaagatatgctacaagatttaggatacggatatataggagacactattaggactttcttcaaagagaacacagaaatccgtccacgagataaaagcattttaactttagaagacgtggatagtttcttaactacgttatcatccgtaactaaagaatcgcatcaaataaaattattgactgatatcgcatccgtttgtacatgtaatgatttaaaatgtgtagtcatgcttattgataaagatctaaaaattaaagcgggtcctcggtacgtacttaacgctattagtcctaatgcctatgatgtgtttagaaaatctaataacttgaaagagataatagaaaatgcatctaaacaaaatctagactctatatctatttctgttatgactccaattaatcccatgttagcggaatcgtgtgattctgtcaataaggcgtttaaaaaatttccatcaggaatgtttgcggaagtcaaatacgatggtgaaagagtacaagttcataaaaataataacgagtttgccttctttagtagaaacatgaaaccagtactctctcataaagtggattatctcaaagaatacataccgaaagcatttaaaaaagctacgtctatcgtattggattctgaaattgttcttgtagacgaacataatgtaccgctcccgtttggaagtttaggaatacacaaaaagaaagaatataaaaactctaacatgtgtttgttcgtgtttgactgtttgtactttgatggattcgatatgacggacattccattgtacgaacgaagatcttttctcaaagatgttatggttgaaatacccaatagaatagtattctcagagttgacgaatattagtaacgagtctcagttaactgacgtattggatgatgcactaacgagaaaattagaaggattggtcttaaaagatattaatggagtatacgaaccgggaaagagaagatggttaaaaataaagcgagactatttgaacgagggttccatggcagattctgccgatttagtagtactaggtgcttactatggtaaaggagcaaagggtggtatcatggcagtctttctaatgggttgttacgacgatgaatccggtaaatggaagacggttaccaagtgttcaggacacgatgataatacgttaagggttttgcaagaccaattaacgatggttaaaattaacaaggatcccaaaaaaattccagagtggttggtagttaataaaatctatattcccgattttgtagtagaggatccgaaacaatctcagatatgggaaatttcaggagcagagtttacatcttccaagtcccataccgcaaatggaatatccattagatttcctagatttactaggattagagaagataaaacgtggaaagaatctactcatctaaacgatttagtaaacttgactaaatcttaatagttacatacaaactgaaaattaaaataacactatttagttggtggtcgccatggatggtgttattgtatactgtctaaacgcgttagtaaaacatggcgaggaaataaatcatataaaaaatgatttcatgattaaaccatgttgtgaaagagtttgtgaaaaagtcaagaacgttcacattggcggacaatctaaaaacaatacagtgattgcagatttgccatatatggataatgcggtatccgatgtatgcaattcactgtataaaaagaatgtatcaagaatatccagatttgctaatttgataaagatagatgacgatgacaagactcctactggtgtatataattattttaaacctaaagatgttattcctgttatcatatctataggaaaggataaagatgtctgtgaactattaatctcatcagacatatcgtgtgcatgcgtggagttaaattcatatcacgtagccattcttcccatggatgtttccttttttaccaaaggaaatgcatcattgattattctcctgtttgatttctctatcgatgcagcacctctcttaagaagtgtaaccgataataatgttattatatctagacaccagcgtctacatgacgagcttccgagttccaattggttcaagttttacataagtataaagtccgactattgttctatattatatatggttgttgatggatctgtgatgcatgcgatagctgataatagaactcacgcaattattagcaaaaatatattagacaatactacgattaacgatgagtgtagatgctgttattttgaaccacagattaggattcttgatagagatgagatgctcaatggatcatcgtgtgatatgaacagacattgtattatgatgaatttacctgatgtaggcaaatttggatctagtatgttggggaaatatgaacctgacatgattaagattgctctttcggtggctggtaatttaataagaaatcgagactacattcccgggagacgaggatatagctactacgtttacggtatagcctctagataatttttttaagcacgaaataaaaaacataattttaaaccaatctatttcatactattttgtgtgatcaccatggacataaagatagatattagtatttctggtgataaatttacggtgactactaggagggaaaatgaagaaagaaaaaaatatctacctctccaaaaagaaaaaactactgatgttatcaaacctgattatcttgagtacgatgacttgttagatagagatgagatgtttactattctagaggaatattttatgtacagaggtctattaggcctcagaataaaatatggacgactctttaacgaaattaaaaaattcgacaatgatgcggaagaacaattcggtactatagaagaactcaagcagaaacttagattaaattctgaagagggagcagataactttatagattatataaaggtacaaaaacaggatatcgtcaaacttactgtatacgattgcatatctatgataggattgtgtgcatgcgtggtagatgtttggagaaatgagaaactgttttctagatggaaatattgtttacgagctattaaactgtttattaatgatcacatgcttgataagataaaatctatactgcagaatagactagtatatgtggaaatgtcatagaaagttaaaagttaatgagagcaaaaatatataaggttgtattccatatttgttattttttctgtaatagttagaaaaatacattcgatggtctatctaccagattattatgtgttataaggtactttttctcataataaactagagtatgagtaagatagtgtttttcaaaacatataaatctaaaattgatggatgagatatacagctattaatttcgaaaatatattttaatctgataactttaaacatggatttttgatggtggtttaacgttttaaaaaaagattttgttattgtagtatatgataatattaaaagatggatataaagaatttgctgactgcatgtactattttttacattactacattggctacggcagatatacctactccgccaccaacgggtcatgtgacaagggagaatatcttgataagaggcataatcaatgttgtaatcggtgtccacctggagaatttgccaaggttagatgtaatggtaacgataacacaaaatgtgaacgctgcccacctcatacatataccacaatcccaattattctaatggatgtcatcaatgtagaaaatgcccaaccggatcatttgataaggtaaagtgtaccggaacacagaacagtaaatgttcgtgtcttcctggttggtattgtgctactgattcttcacagactgaagattgttgaaattgtgtaccaaaaaggagatgtccatgcggatactttggtggaatagatgaacaaggaaatcctatttgtaaatcgtgttgtgttggtgaatattgcgactacctacgtaattatagacttgatccatttcctccatgcaaactatctaaatgtaattaattatgattttgatgataatgttaccatacattatatcgctacttggttagtgtattattcagtatgaagacctattaataattacttatcttttgacgatcttgttataattataatataaaaatacttatggcatagtaactcataattgctgacgcgataaattcgtaataatctgttttgttcaaatttttataaggaatctacaggcataaaaataaaaatataatttataatatactcttacagcgcgccatcatgaataacagcagtgaattgattgctgttattaatggatttagaaatagtggacgattttgtgatattagtatagttattaatgatgaaaggataaacgctcataaactcatcctatctggagcctccgaatatttttccattctgttttccaataattttatcgattctaatgaatacgaagttaatctaagtcatttagattatcaaagcgttaacgatttgatcgattacatttatgggatacctttgagcctaactaacgataacgtgaaatatattctttcaaccgctgattttttacaaattggatctgctattacggagtgtgaaaattacatacttaaaaatctttgttctaaaaactgtatcgatttctacatatacgctgataaatataataacaagaaaatagaatcagcgtcgtttaacacaatattacaaaatattttgagactcatcaacgatgaaaactttaaatacttaacagaggaatcaatgataaaaattttaagcgatgatatgttaaatataaaaaatgaggattttgcaccactaattctcattaaatggttagagagtactcaacaatcatgcaccgtcgagttacttagatgcctcagaatatcattgctttccccacaagttataaaatcactttatagtcatcaactggttagttcaatctacgaatgtataacattcttaaacaatatagcattcttggatgaatcatttcctagataccatagcatcgagttgatatctatcggtataagtaattcgcatgataagatttccataaactgctacaatcataaaaaaaatacatgggaaatgatatcttcacgtagatataggtgtagtttcgcagtggccgtcctggataatattatctatatgatgggtggatatgatcagtccccgtatagaagttcaaaggttatagcgtacaatacatgtacaaattcttggatatatgatataccagagctaaaatatcctcgttctaattgtgggggactggctgatgacgaatacatttattgtataggcggcatacgcgatcaggattcatcgttgacatctagtattgataaatggaagccatcaaaaccatattggcagaagtatgctaaaatgcgcgaaccaaaatgtgatatgggggttgcgatgttaaacggattaatatatgtcatgggtggaatcgttaaaggtgacacgtgtaccgacgcactagagagtttatcagaagatggatggatgaagcatcaacgtcttccaataaaaatgtccaatatgtcgacgattgttcatgatggcaagatttatatatctggaggttacaacaatagtagtgtagttaatgtaatatcgaatctagtccttagctataatccgatatatgatgaatggaccaaattatcatcattaaacattcctagaattaatcccgctctatggtcagcgcataataaattatatgtaggaggaggaatatctgatgatgttcgaactaatacatctgaaacatacgataaagaaaaagattgttggacattggataatggtcacgtgttaccacgcaattatataatgtataaatgcgaaccgattaaacataaatatccattggaaaaaacacagtacacgaatgattttctaaagtatttggaaagttttataggtagttgatagaacaaaatacataattttgtaaaaataaatcactttttatactaatatgacacgattaccaatacttttgttactaatatcattagtatacgctacaccttttcctcagacatctaaaaaaataggtgatgatgcaactctatcatgtaatcgaaataatacaaatgactacgttgttatgagtgcttggtataaggagcccaattccattattcttttagctgctaaaagcgacgtcttgtattttgataattataccaaggataaaatatcttacgactctccatacgatgatctagttacaactatcacaattaaatcattgactgctagagatgccggtacttatgtatgtgcattctttatgacatcaactacaaatgacactgataaagtagattatgaagaatactccacagagttgattgtaaatacagatagtgaatcgactatagacataatactatctggatctacacattcaccggaaactagttctaagaaacctgattatatagataattctaattgctcgtcggtattcgaaatcgcgactccggaaccaattactgataatgtagaagatcatacagacaccgtcacatacactagtgatagcattaatacagtaagtgcatcatctggagaatccacaacagacgagactccggaaccaattactgataaagaagatcatacagttacagacactgtctcatacactacagtaagtacatcatctggaattgtcactactaaatcaaccaccgatgatgcggatctttatgatacgtacaatgataatgatacagtaccaccaactactgtaggcggtagtacaacctctattagcaattataaaaccaaggactttgtagaaatatttggtattaccgcattaattatattgtcggccgtggcaattttctgtattacatattatatatataataaacgttcacgtaaatacaaaacagagaacaaagtctagatttttgacttacataaatgtctgggatagtaaaatctatcatattgagcggaccatctggtttaggaaagacagccatagccaaaagactatgggaatatatttggatttgtggtgtcccataccactagatttcctcgtcctatggaacgagaaggtgttgattaccattacgttaacagagaggccatctggaagggaatagccgccggaaactttctagaacatactgagtttttaggaaatatttacggaacttctaaaacagctgtgaatacagcggctattaataatcgtatttgtgtgatggatctaaacatcgacggtgttagaagtcttaaaaatacgtacctaatgccttactcggtgtatataagacctacctctcttaaaatggttgagaccaagcttcgttgtagaaacactgaagctaacgatgagattcatcgtcgcgtgatattggcaaaaacggatatggatgaggccaacgaagcaggtctattcgacactattatcattgaagatgatgtgaatttagcatatagtaagttaattcagatactacaggaccgtattagaatgtattttaacactaattagagacttaagacttaaaacttgataattaataatataactcgtttttatatgtggctatttcaacgtctaatgtattagttaaatattaaaacttaccacgtaaaacttaaaatttaaaatgatatttcattgacagatagatcacacattatgaactttcaaggacttgtgttaactgacaattgcaaaaatcaatgggtcgttggaccattaataggaaaaggtggattcggtagtatttatactactaatgacaataattatgtagtaaaaatagagcccaaagctaacggatcattatttaccgaacaggcattttatactagagtacttaaaccatccgttatcgaagaatggaaaaaatctcacaatataaagcacgtaggtcttatcacgtgcaaggcatttggtctatacaaatccattaatgtggaatatcgattcttggtaattaatagattaggtgcagatctagatgcggtgatcagagccaataataatagattaccaaaaaggtcggtgatgttgatcggaatcgaaatcttaaataccatacaatttatgcacgagcaaggatattctcacggagatattaaagcgagtaatatagtcttggatcaaatagataagaataaattatatctagtggattacggattggtttctaaattcatgtctaatggagaacatgttccatttataagaaatccaaataaaatggataacggtactctagaatttacacctatagattcgcataaaggatacgttgtatctagacgtggagatctagaaacacttggatattgtatgattagatggttgggaggtatcttgccatggactaagatatctgaaacaaagaattgtgcattagtaagtgccacaaaacagaaatatgttaacaatactgcgactttgttaatgaccagtttgcaatatgcacctagagaattgctgcaatatattaccatggtaaactctttgacatattttgaggaacccaattatgacgagtttcggcacatattaatgcagggtgtatattattaagtgtggtgtttggtcgatgtaaaatttttgtcgataaaaattaaaaaataacttaatttattattgatctcgtgtgtacaaccgaaatcatggcgatgttttacgcacacgctctcggtgggtacgacgagaatcttcatgcctttcctggaatatcatcgactgttgccaatgatgtcaggaaatattctgttgtgtcagtttataataacaagtatgacattgtaaaagacaaatatatgtggtgttacagtcaggtgaacaagagatatattggagcactgctgcctatgtttgagtgcaatgaatatctacaaattggagatccgatccatgatcaagaaggaaatcaaatctctatcatcacatatcgccacaaaaactactatgctctaagcggaatcgggtacgagagtctagacttgtgtttggaaggagtagggattcatcatcacgtacttgaaacaggaaacgctgtatatggaaaagttcaacatgattattctactatcaaagagaaggccaaagaaatgaatgcacttagtccaggacctatcattgattaccacgtctggataggagattgtatctgtcaagttactgctgtggacgtacatggaaaggaaattatgagaatgagattcaaaaagggtgcggtgcttccgatcccaaatctggtaaaagttaaacttggggagaatgatacagaaaatctttcttctactatatcggcggcaccatcgaggtaaccacctctctggaagacagcgtgaataatgtactcatgaaacgtttggaaactatacgccatatgtggtctgtcgtatatgatcattttgatattgtgaatggtaaagaatgctgttatgtgcatacgcatttgtctaatcaaaatcttataccgagtactgtaaaaacaaatttgtacatgaagactatgggatcatgcattcaaatggattccatggaagctctagagtatcttagcgaactgaaggaatcaggtggatggagtcccagaccagaaatgcaggaatttgaatatccagatggagtggaagacactgaatcaattgagagattggtagaggagttcttcaatagatcagaacttcaggctggtgaatcagtcaaatttggtaattctattaatgttaaacatacatctgtttcagctaagcaactaagaacacgtatacggcagcagcttcctttatactctcatcttttaccaacacaaagggtggatatttgttcattggagttgataataatacacacaaagtaattggattcacggtgggtcatgactacctcagactggtagagaatgatatagaaaagcatatcaaaagacttcgtgttgtgcatttctgtgagaagaaagaggacatcaagtacacgtgtcgattcatcaaggtatataaacctggggatgaggctacctcgacatacgtgtgcgctatcaaagtggaaagatgctgttgtgctgtgtttgcagattggccagaatcatggtatatggatactaatggtatcaagaagtattctccagatgaatgggtgtcacatataaaattttaattaatgtaatagagaacaaataataaggttgtaatatcatatagacaataactaacaattaattagtaactgttatctcttttttaactaaccaactaactatatacctattaatacatcgtaattatagttcttaacatctattaatcattaattcgcttctttaattttttataaactaacattgttaattgaaaagggataacatgttacagaatataaattatatatggatttttttaaaaaggaaatacttgactggagtatatatttatctcttcattatatagcacgcgtgttttccaatttttccacatcccatataatacaggattataatctcgttcgaacatacgagaaagtggataaaacaatagttgattttttatctaggttgccaaatttattccatattttagaatatggggaaaatattctacatatttattctatggatgatgctaatacgaatattataattttttttctagatagagtattaaatattaataagaacgggtcatttatacacaatctcaggttatcatcatccattaatataaaagaatatgtatatcaattagttaataatgatcatccagataataggataagactaatgcttgaaaatggacgtagaacaagacattttttgtcctatatatcagatacagttaatatctatatatgtattttaataaatcatggattttatatagatgccgaagacagttacggttgtacattattacatagatgtatatatcactataagaaatcagaatcagaatcatacaatgaattaattaagatattgttaaataatggatcagatgtagataaaaaagatacgtacggaaacacaccttttatcctattatgtaaacacgatatcaacaacgtggaattgtttgagatatgtttagagaatgctaatatagactctgtagactttaatagatatacacctcttcattatgtctcatgtcgtaataaatatgattttgtaaagttattaatttctaaaggagcaaatgttaatgcgcgtaatagattcggaactactccattttattgtggaattatacacggtatctcgcttataaaactatatttggaatcagacacagagttagaaatagataatgaacatatagttcgtcatttaataatttttgatgctgttgaatctttagattatctattatccagaggagttattgatattaactatcgtactatatacaacgaaacatctatttacgacgctgtcagttataatgcgtataatacgttggtctatctattaaacagaaatggtgattttgagacgattactactagtggatgtacatgtatttcggaagcagtcgcaaacaacaacaaaataataatggaagtactattgtctaaacgaccatctttgaaaattatgatacagtctatgatagcaattactaaacataaacagcataatgcagatttattgaaaatgtgtataaaatatactgcgtgtatgaccgattatgatactcttatagatgtacagtcgctacagcaatataaatggtatattttaaaatgtttcgatgaaatagatatcatgaagagatgttatataaaaaataaaactgtattccaattagttttttgtatcaaagacattaatactttaatgagatacggtaaacatccttctttcgtgaaatgcactagtctcgacgtatacggaagtcgtgtacgtaatatcatagcatctattagatatcgtcagagattaattagtctattatccaagaagctggatcctggagataaatggtcgtgttttcctaacgaaataaaatataaaatattggaaaactttaacgataacgaactatccacatatctaaaaatcttataaacactattaaaatataaaatctaagtaggataaaatcacactacatcattgtttccttttagtgctcgacagtgtatactatttttaacactcataaataaaaatgaaaacgatttccgttgttacgttgttatgcgtactacctgctgttgtttattcaacatgtactgtacccactatgaataacgctaaattaacgtctaccgaaacatcgtttaatgataaacagaaagttacgtttacatgtgatcagggatatcattcttcggatccaaatgctgtctgcgaaacagataaatggaaatacgaaaatccatgcaaaaaaatgtgcacagtttctgattacatctctgaattatataataaaccgctatacgaagtgaattccaccatgacactaagttgcaacggcgaaacaaaatattttcgttgcgaagaaaaaaatggaaatacttcttggaatgatactgttacgtgtcctaatgcggaatgtcaacctcttcaattagaacacggatcgtgtcaaccagttaaagaaaaatactcatttggggaatatatgactatcaactgtgatgttggatatgaggttattggtgcttcgtacataagttgtacagctaattcttggaatgttattccatcatgtcaacaaaaatgtgatatgccgtctctatctaatggattaatttccggatctacattttctatcggtggcgttatacatcttagttgtaaaagtggttttacactaacggggtctccatcatccacatgtatcgacggtaaatggaatcccgtactcccaatatgtgtacgaactaacgaagaatttgatccagtggatgatggtcccgacgatgagacagatttgagcaaactctcgaaagacgttgtacaatatgaacaagaaatagaatcgttagaagcaacttatcatataatcatagtggcgttaacaattatgggcgtcatatttttaatctccgttatagtattagtttgttcctgtgacaaaaataatgaccaatataagttccataaattgctaccgtaaatataaatccgttaaaataatgaataattaataacgaacaagtatcaaaagattaaagaattatagctagaatcaattgagatgtcttcttcagtggatgttgatatctacgatgccgttagagcatttttactcaggcactattataacaagagatttattgtgtatggaagaagtaacgccatattacataatatatacaggctatttacaagatgcgccgttataccgttcgatgatatagtacgtactatgccaaatgaatcacgtgttaaacaatgggtgatggatacacttaatggtataatgatgaatgaacgcgatgtttctgtaagcgttggcaccggaatactattcatggaaatgtttttcgattacaataaaaatagtatcaacaatcaactaatgtatgatataattaatagcgtatctataattctagctaatgagagatatagaagcgcttttaacgacgatggtatatacatccgtagaaatatgattaacaagttgtacggatacgcatctctaactactattggcacgatcgctggaggtgtttgttattatctgttgatgcatctagttagtttgtataaataattatttcaatatactagttaaaattttaagattttaaatgtataaaaaactaataacgtttttatttgtaataggtgcattagcatcctattcgaataatgagtacactccgtttaataaactgagtgtaaaactctatatagatggagtagataatatagaaaattcatatactgatgataataatgaattggtgttaaattttaaagagtacacaatttctattattacagagtcatgcgacgtcggatttgattccatagatatagatgttataaacgactataaaattattgatatgtataccattgactcgtctactattcaacgcagaggtcacacgtgtagaatatctaccaaattatcatgccattatgataagtacccttatattcacaaatatgatggtgatgagcgacaatattctattactgcagagggaaaatgctataaaggaataaaatatgaaataagtatgatcaacgatgatactctattgagaaaacatactcttaaaattggatctacttatatatttgatcgtcatggacatagtaatacatattattcaaaatatgatttttaaaaatttaaaatatattatcacttcagtgacagtagtcaaataacaaacaacaccatgagatatattataattctcgcagttttgttcattaatagtatacacgctaaaataactagttataagtttgaatccgtcaattttgattccaaaattgaatggactggggatggtctatacaatatatcccttaaaaattatggcatcaagacgtggcaaacaatgtatacaaatgtaccagaaggaacatacgacatatccgcatttccaaagaatgatttcgtatctttctgggttaaatttgaacaaggcgattataaagtggaagagtattgtacgggactatgcgtcgaagtaaaaattggaccaccgactgtaacattgactgaatacgacgaccatatcaatttgtacatcgagcatccgtatgctactagaggtagcaaaaagattcctatttacaaacgcggtgacatgtgtgatatctacttgttgtatacggctaacttcacattcggagattctaaagaaccagtaccatatgatatcgatgactacgattgcacgtctacaggttgcagcatagactttgtcacaacagaaaaagtgtgcgtgacagcacagggagccacagaagggtttctcgaaaaaattactccatggagttcgaaagtatgtctgacacctaaaaagagtgtatatacatgcgcaattagatccaaagaagatgttcccaatttcaaggacaaaatggccagagttatcaagagaaaatttaataaacagtctcaatcttatttaactaaatttctcggtagcacatcaaatgatgttaccacttttcttagcatgcttaacttgactaaatattcataactaatttttattaatgatacaaaaacgaaataaaactgcatattatacactggttaacgcccttataggctctaaccattttcaagatgaggtccctgattatagtccttctgttcccctctatcatctactccatgtctattagacaatgtgagaagactgaagaggaaacatggggattgaaaatagggttgtgtataattgccaaagatttctatcccgaaagaactgattgcagtgttcatctcccaactgcaagtgaaggattgataactgaaggcaatggattcagggatatacgaaacaccgataaattataaaaaaagcaatgtgtccgctgtttccgttaataatactattttcgtaactggcggattattcataaataactctaatagcacgatcgtggttaacaatatggaaaaacttgacatttataaagacaaacaatggtcgattatagaaatgcctatggctagggtatatcacggcatcgactcgacatttggaatgttatattttgccggaggtctatccgttaccgaacaatatggtaatttagagaaaaacaacgagatatcttgttacaatcctagaacgaataagtggtttgatatttcatatactatttataagatatccatatcatcattgtgtaaactaaataacgtcttctatgtatttagtaaggacattggatatgtggaaaagtatgatggtgcatggaagttagtacatgatcgtctccccgctataaaggcattatcaacttctccttattgattgaaaatgaaaatataaatagtttttatgtatagcagtattaccctatagttttattgcttactactaacatggatacagatgttacaaatgtagaagatatcataaatgaaatagatagagagaaagaagaaatactaaaaaatgtagaaattgaaaataataaaaacattaacaagaatcatccaagtggatatattagagaagcactcgttattaataccagtagtaatagtgattccattgataaagaagttatagaatgtatctgtcacgatgtaggaatatagatcatatctactaatttttataatcgatacaaaacataaaaaacaactcgttattacatagcaggcatggaatccttcaagtattgttttgataacgatggcaagaaatggattatcggaaatactttatattctggtaattcaatactatataaggtcagaaaaaatttcactagttcgttctacaattacgtaatgaagatagatcacaaatcacacaagccattgttgtctgaaatacgattctatatatctgtattggatcctttgactatcgacaactggacacgggaacgtggtataaagtatttggctattccagatctgtatggaattggagaaaccgatgattatatgttcttcgttataaagaatttgggaagagtattcgccccaaaggatactgaatcagtcttcgaagcatgcgtcactatgataaacacgttagagtttatacactctcaaggatttacccatggaaaaatagaaccgaggaatatactgattagaaataaacgtctttcactaattgactattctagaactaacaaactatacaagagtggaaactcacatatagattacaacgaggacatgataacttcaggaaatatcaattatatgtgtgtagacaatcatcttggagcaacagtttcaagacgaggagatttagaaatgttgggatattgcatgatagaatggttcggtggcaaacttccatggaaaaacgaaagtagtataaaagtaataaaacaaaaaaaagaatataaaaaatttatagctactttctttgaggactgttttcctgaaggaaatgaacctctggaattagttagatatatagaattagtatacacgttagattattctcaaactcctaattatgacagactacgtaaactgtttatacaagattgaaattatattcttttttttatagagtgtggtagtgttacggatatttaatattagactatctctatcgcgctacacgaccaatatcgattactatggatatcttcagggaaatcgcatcttctatgaaaggagagaatgtattcatttctccagcgtcaatctcgtcagtattgacaatactgtattatggagctaatggatccactgctgaacagctatcaaaatatgtagaaaaggaggagaacatggataaggttagcgctcaaaatatctcattcaaatccataaataaagtatatgggcgatattctgccgtgtttaaagattcctttttgagaaaaattggcgataagtttcaaactgttgacttcactgattgtcgcactatagatgcaatcaacaagtgtgtagatatctttactgaggggaaaatcaatccactattggatgaaccattgtctcctgatacctgtctcctagcaattagtgccgtatactttaaagcaaaatggttgacgccattcgaaaaggaatttaccagtgattatcccttttacgtatctccgacggaaatggtagatgtaagtatgatgtctatgtacggcaaggcatttaatcacgcatctgtaaaggaatcattcggcaacttttcaatcatagaactgccatatgttggagatactagtatgatggtcattcttccagacaagattgatggattagaatccatagaacaaaatctaacagatacaaattttaagaaatggtgtaactctctggaagctacgtttatcgatgttcacattcccaagtttaaggtaacaggctcgtataatctggtggatactctagtaaagtcaggactgacagaggtgttcggttcaactggagattatagcaatatgtgtaattcagatgtgagtgtcgacgctatgatccacaaaacgtatatagatgtcaatgaagagtatacagaagcagctgcagcaacttgtgcactggtgtcagactgtgcatcaacaattacaaatgagttctgtgtagatcatccgttcatctatgtgattaggcatgttgatggaaaaattcttttcgttggtagatattgctctccgacaactaattgttaaccattttttttaaaaaatagaaaaaacatgtggtattagtgcaggtcgttattcttccaattgcaattggtaagatgacggccaactttagtacccacgtcttttcaccacagcactgtggatgtgacagactgaccagtattgatgacgtcagacaatgtttgactgaatatatttattggtcgtcctatgcataccgcaacaggcaatgcgctggacaattgtattccacactcctctcttttagagatgatgcggaattagtgttcatcgacattcgcgagctggtaaaaaatatgccgtgggatgatgtcaaagattgtgcagaaatcatccgttgttatataccggatgagcaaaaaaccatcagagagatttcggccatcatcggactttgtgcatatgctgctacttactggggaggtgaagaccatcccactagtaacagtctgaacgcattgtttgtgatgcttgagatgctcaattacgtggattataacatcatattccggcgtatgaattgatgagttgtacatcttgacattttcttctttcttctcttctccctttcccagaaacaaactttttttacccactataaaataaaatgagtatactacctgttatatttctttctatatttttttattcttcattcgttcagacttttaacgcgcctgaatgtatcgacaaagggcaatattttgcatcattcatggagttagaaaacgagccagtaatcttaccatgtcctcaaataaatacgctatcatccggatataatatattagatattttatgggaaaaacgaggagcggataatgatagaattataccgatagataatggtagcaatatgctaattctgaacccgacacaatcagactctggtatttatatatgcattaccacgaacgaaacctactgtgacatgatgtcgttaaatttgacaatcgtgtctgtctcagaatcaaatatagatcttatctcgtatccacaaatagtaaatgagagatctactggcgaaatggtatgtcccaatattaatgcatttattgctagtaacgtaaacgcagatattatatggagcgggcatcgacgccttagaaataagagacttaaacaacggacacctggaattattaccatagaagatgttagaaaaaatgatgctggttattatacatgtgttttagaatatatatacggtggcaaaacatataacgtaaccagaattgtaaaattagaggtacgggataaaataataccttctactatgcaattaccagatggcattgtaacttcaataggtagtaatttgactattgcatgcagagtatcgttgagacctcccacaacggatgcagacgtcttttggataagtaatggtatgtattacgaagaagatgatggggacggaaacggtagaataagtgtagcaaataaaatctatatgaccgataagagacgtgttattacatcccggttaaacattaatcctgtcaaggaagaagatgctacaacgtttacgtgtatggcgtttactattcctagcatcagtaaaacagttactgttagtataacgtgaatgtatgttgttacatttccatgtcaattgagtttataagaatttttatacattatcttccaacaagcaattgacgaacgtattgctatgattaactcccacgatactatgcatattattaatcattaacttgcagactatacctagagctattttgacatactcgtgttcttgtgtaattgcagtatctatattattaaagtacgtaaatctagctatagttttattatttaattttagataatataccgtctccttatttttaaaaattgccacatcctttattaaatcatgaatgggaatttctatgtcatagttaatatattgtgaacaacaagagcagatatctataggaaagggtggaatgcgatacattgatctatgtagttttaaaacacacgcaaactttgaagaatttatataaatcattccatcgatacatccttctatgttgagatgtatatatccaggaattcgtttattaatatcgggaaatgtataaactaaaacattgcccggaagcggagcttctaccggagttatatcagtttttaacttacaaaatgtaaccaatacctttgcatgacttgttttgttcggcaacgttagtttaaacttgacgaatggattaattacaatagcatgatccgcgcatctattaagtttttttactttaacgcccttgtatgtttttacagagactttatctaaatttctagtgcttgtatgtgttataaatataacgggatatagaactgaatcacctaccttagatacccaattacattttatcagatccagataataaacaaattttgtcgccctaactaattctatattgttatatattttacaattggttatgatatcatgtaataacttggaatctaacgcacatcgtcgtacgtttatacaattgtgatttagtgtagtatatctacacatgtatttttccgcgctatagtattctggactagtgataaaactatcgttatatctgtcttcaatgaactcatcgagatattgctctctgtcatattcatacacctgcataaactttctagacatcttacaatccgtgttattttaggatcatatttacatatttacgggtatatcaaagatgttagattagttaatgggaatcgtctataataatgaatattaaacaattatatgaggacttttaccacaaagcatcataaaaatgagtcgtcgtctgatttatgttttaaatatcaaccgcgaatcaactcataaaatacaagagaatgaaatatatacatattttagtcattgcaatatagaccatacttctacagaacttgattttgtagttaaaaactatgatctaaacagacgacaacctgtaactgggtatactgcactacactgctatttgtataataattactttacaaacgatgtactgaagatattattaaatcatggagtggatgtaacgatgaaaaccagtagcggacgtatgcctgtttatatattgcttactagatgttgcaatatttcacatgatgtagtgatagatatgatagacaaagataaaaaccacttattacatagagactattccaacctattactagagtatataaaatctcgttacatgttattaaaggaagaggatatcgatgagaacatagtatccactttattagataagggaatcgatcctaactttaaacaagacggatatacagcgttacattattattatttgtgtctcgcacacgtttataaaccaggtgagtgtagaaaaccgataacgataaaaaaggccaagcgaattatttctttgtttatacaacatggagctaatctaaacgcgttagataattgtggtaatacaccattccatttgtatcttagtattgaaatgtgtaataatattcatatgactaaaatgctgttgacttttaatccgaatttcgaaatatgtaataatcatggattaacgcctatactatgttatataacttccgactacatacaacacgatattcttgttatgttaatacatcactatgaaacaaatgttggagaaatgccgatagatgagcgtcgtataatcgtattcgagtttatcaaaacatattctacacgtcctgcagattcgataacttatttgatgaataggtttaaaaatatagatatttatacccgctatgaaggaaagacattattacacgtagcatgtgaatataataatacacacgtaatagattatcttatacgtatcaacggagatataaatgcgttaaccgacaataacaaacacgctacacaactcattatagataacaaagaaaattccccatataccattaattgtttactgtatatacttagatatattgtagataagaatgtgataagatcgttggtggatcaacttccatctctacctatcttcgatataaaatcatttgagaaattcatatcctactgtatacttttagatgacacattttacaatagacacgttaggaatcgcgattctaaaacgtatcgatacgcattttcaaaatacatgtcgtttgataaatacgatggtataataactaaatgtcataaagaaacaatattgctcaaactatccactgttctagacactacactatatgcagttttaagatgccataattcgaaaaagttaagaagatacctcaccgagttaaaaaaatataataacgataagtcctttaaaatatattctaatattatgaatgagagataccttaatgtatattataaagatatgtacgtgtcaaaggtatatgataaactatttcctgttttcacagataaaaattgtctactaacattactaccttcagaaattatatacgaaatattatacatgctgacaattaacgatctttataatatatcgtatccacctaccaaagtatagttgtatttttctcatgcgatgtgtgtaaaaaaactgatattatataaatattttagtgccgtataataaagatgacgatgaaaatgatggtacatatatatttcgtatcattattgttattgctattccacagttacgccatagacatcgaaaatgaaatcacagaattcttcaataaaatgagagatactctaccagctaaagactctaaatggttgaatccagcatgtatgttcggaggcacaatgaatgatatagccgctctaggagagccattcagcgcaaagtgtcctcctattgaagacagtcttttatcgcacagatataaagactatgtggttaaatgggaaaggctagaaaaaaatagacggcgacaggtttctaataaacgtgttaaacatggtgatttatggatagccaactatacatctaaattcagtaaccgtaggtatttgtgcaccgtaactacaaagaatggtgactgtgttcagggtatagttagatctcatattagaaaacctccttcatgcattccaaaaacatatgaactaggtactcatgataagtatggcatagacttatactgtggaattctttacgcaaaacattataataatataacttggtataaagataataaggaaattaatatcgacgacattaagtattcacaaacgggaaaggaattaattattcataatccagagttagaagatagcggaagatacgactgttacgttcattacgacgacgttagaatcaagaatgatatcgtagtatcaagatgtaaaatacttacggttataccgtcacaagaccacaggtttaaactaatactagatccaaaaatcaacgtaacgataggagaacctgccaatataacatgcactgctgtgtcaacgtcattattgattgacgatgtactgattgaatgggaaaatccatccggatggcttataggattcgattttgatgtatactctgttttaactagtagaggcggtattaccgaggcgaccttgtactttgaaaatgttactgaagaatatataggtaatacatataaatgtcgtggacacaactattattttgaaaaaacccttacaactacagtagtattggagtaaatatacaatgcatttttatatacattactgaataattattattattatttatatcgtatttgtgctataacgcgactatctaggtatttgtatctcaccgatagagaacatataaatgtagactctattaaacagttgtgtaaaatatcagatcctaatgcatgttatagatgtggatgtacggctttacatgagtacttttataattatagatcagtcaacggaaaatacaagtatagatacaacggttactatcaatattatttatctagcgattatgaaaattataatgaatattattatgatgattatgatagaactggtatgaacagtgagagtgataatatatcaatcaaaacagaatatgaattctatgatgaaacacaagatcaaagtacacaactagtaggttacgacattaaactcaaaaccaatgaggatgattttatggctatgatagatcagtgggtgtccatgattatatagatgaatcaattaataaagtagtatatggaagagagtctcacgtaagatggcgggatatatggcaagaacataatgatggcgtatacagtataggaaaggagtgcatagataatatatacgaagacaaccataccgtagacgaattctacaagatagacagcgtatcagatgtagatgacgcggaacacatatctccgataactaatgatgtatctacacaaacatgggaaaagaaatcagagttagatagatacatggaaatgtatcctcgtcatagatatagtaagcattctgtctttaagggattttctgacaaagttagaaaaaatgatttagacatgaatgtggtaaaagaattactttctaacggtgcatctctaacaattaaggatagcagtaataaggatccaataaccgtttattttcgaagaacgataatgaatttagaaatgattgatgaacgaaagtatatagtacactcctatctaaaaaattataaaaatttcgattatccatttttcaggaagttagttttgactaataaacattgtctcaacaattattataatataagcgacagcaaatatggaacaccgctacatatattggcgtctaataaaaaattaataactcctaattacatgaagttattagtgtataacggaaatgatataaacgcacgaggtgaagatacacaaatgcgaactccattacacaaatatttgtgtaaatttgtatatcataatattgaatatggtatccgatactataatgaaaagattatagacgcatttatagagttaggagccgatctaactattccaaatgacgatggaatgataccagtagtttactgtatacactcaaatgccgaatatggttataacaatattactaacataaagataatacgtaaactacttaatcttagtagacgtgcgtcacataatctatttagagatcgagtcatgcacgattatataagtaatacatatattgatcttgagtgtttagatattattagatcgttggatggattcgatatcaatggttactttgaaggacgtacaccacttcattgcgctatacaacataacttcactcagattgctaagtacttattagatcgaggagctgatatagtcgtacccaacacattgattatacatcagtacatacagtaaatagcatagatatggaggaggatacaaatatttcaaataaagttataaggtacaacactgtcaataatatatgggaaacattacctaacttctggactggaactataaatccaggcgtggtctcgcataaagatgatatatatgttgtatgcgacatcaaagatgaaaaaaatgttaaaacttgtatatttagatataacacgaatacgtataacggatgggaattggtcacgacgacagaaagcagattatcagctctgcatactattctttataacaataccataatgatgttacattgttatgaatcgtatatgttacaagatacatttaatgtgtacactcgcgaatggaatcatatgtgtcatcaacattcgaatagttatatcatgtacaatatactacccatctactaaatataatagaataaaataaatgagtatgatcattttagataacgattgattttatcattaccgcttcattcttatattctttgcttacggaacctatatttagaaacatctactaacgattttttatgcttgcattattaatggtatgtaatatgattgattgtgtacgcaataccaatttgttaagtatgaatacggggtacaaacataaactgaagtttaacattatttatttatgatatatatcgttattgtttggtctataccatggatatctttaaagaactaatcttaaaacacacggatgaaaatgttttgatttctccagtttctattttatctactttatctattctaaatcatggagcagctggttctacagctgaacaactatcaaaatatatagagaatatgaatgagaatacacccgatgacaataatgacatggacgtagatattccgtattgtgcgacactagctaccgcaaataaaatatacggtagcgatagtatcgagttccacgcctccttcctacaaaaaataaaagacgattttcaaactgtaaactttaataatgctaaccaaacaaaggaactaatcaacgaatgggttaagacaatgacaaatggtaaaattaattccttattgactagtccgctatccattaatactcgtatgacagttgttagcgccgtccattttaaagcaatgtggaaatatccattttctaaacatcttacatatacagacaagttttatatttctaagaatatagttaccagtgttgatatgatggtgagcactgagaataacttgcaatatgtacatattaatgaattattcggaggattctctattatcgatattccatacgagggaaactctagtatggtaattatactaccggacgacatagaaggtatatataacatagaaaaaaatataacagatgaaaaatttaaaaaatggtgtggtatgttatctactaaaagtatagacttgtatatgccaaagtttaaagtggaaatgacagaaccgtataatctggtaccgattttagaaaatttaggacttactaatatattcggatattatgcagattttagcaagatgtgtaatgaaactatcactgtagaaaaatttctacatacgacgtttatagatgttaatgaggagtatacagaagcatcggccgttacaggagtatttatgactaacttttcgatggtatatcgtacgaaggtctacataaaccatccattcatgtacatgattaaagacaacacaggacgtatactttttatagggaaatactgctatccgcaataaatataaacaaatagacttttatcacgtttatctatgtctaaatattacaaatagtaatagtataaactaaagctgataatacttaaaaaaataataatatcatttacaattaatagtataaactaaaaattaaacaaatcgttattataagtaatatcaaaatgatgatatacggattaatagcgtgtcttatattcgtgacttcatccatcgctagtccactttatattcccgttattccacccatttcggaagataaatcgttcaatagtgtagaggtattagtttccttgtttagagatgaccaaaaagactatacggtaacttctcagttcaataactacactatcgataccaaagactggactatcggcgtactatccacacctgatggtttggatataccattgactaatataacttattggtcacggtttactataggtcgtgcattgttcaaatcagagtctgaggatattttccaaaagaaaatgagtattctaggtgtttctatagaatgtaagaagtcgtcgacattacttacttttttgaccgtgcgtaaaatgactcgagtatttaataaatttccagatatggcttattatcgaggagactgtttaaaagccgtttatgtaacaatgacttataaaaatactaaaactggagagactgattacacgtacctctctaatggggggttgcctgcatactatcgtaatggggtcgatggttgattattgattagtatattccttattctttttattcacacaaaaagaacatttttataaacatgaaaccactgtctaaatgtaattatgatcttgatttatagatgaagatcagcctttagaggattttaaccagtatgtttaatatgaaaaaaataaacataacatattttgagattaagcgctattgtgcaagattatattagaatcaaattaatctttcatacgagaaaaataacgacatacgtcgtcaacaaattaaactttttatttattagttaactagcttatagaacttgctcattgttatgtttctaaaacgggtacgacatataggacaattatccgacgcaccggtttctcttcgtgttttatgccatatattgatgcatgttatgcaaaatatatgagtacacgaatccaataaaccaaagtatctatcgttttgagtaaacaacttcatagcaaattccacattctttttctttacttactctatacacgtcctcgtatttatccagtattttgatgatatccaactcagaaatggttgttgtattattgggtgtattgggagtataggtattattagctatgtaccaatttaccaaccctcttaatattgattgaacaatcacatcggttatccaatcaataaccacattaataactaaattgtagtgtatatatagaccatatatgtttctatttttttgacagttacgtatagtttcagtaagttttgattgttgtattcctgtatctctagataagttagtcatatagtcccttccggcgatacgttttttccaagcccgaaattgattagccaaatgtgtatttatttttgtgatattgatataatatgtaatgttattaatatttcggataatgcatactgttagtcttatatcatttggttcatctatgtattgtaatattgttacatgatctatagatgatgtattgattttggcaggatcgaattccatatccgcgactaaacagtgaaaaaaatgtaaatactttttaaattttaaattagtaaaacttttttttattttttatgattccaaaaatactgaatacaaagtcctaaattataaatatggagatcatactaccacaacttattattatgcatactcagccggtgtaatagatagatatatataattctattacaccggcagacaattaccgatcggtatttgtcgttaccaacataccgtataatatgtaatatacaattccataacccattgacagttgttatacatcaaaattgcaattcttttgattacgatgttataagaatgtagttaattgatgtatgatgttaatgtgtcctctttcctcttataacatcgtaatcaaaaacttttttataatatatacctaataatgtgtcttaatagttctcgtgattcgtcaaacaatcattcttataaaatataataaagcaacgtaaaacacataaaaataagcgtaactaataagacaatggatatttacgacgataaaggtctacagactattaaactgtttaataatgaatttgattgtataaggaatgacatcagagaattatttaaacatgtaactgattccgatagtatacaacttccgatggaagacaattctgatattatagaaaatatcagaaaaatactatatagacgattaaaaaatgtagaatgtgttgacatcgatagtacaataacttttatgaaatacgatccaaatgatgataataagcgtacgtgttctaattgggtacccttaactaataactatatggaatattgtctagtaatatatttggaaacaccgatatgtggaggcaaaataaaattataccaccctacaggaaatataaagtcggataaggatattatgtttgcaaagactctagactttaaatcaaagaaagtgttaactggacgtaaaacaattgccgttctagacatatccgtttcatataatagatcaatgactactattcactacaacgacgacgttgatatagatatacatactgataaaaatggaaaagagttatgttattgttatataacaatagatgatcattacttggttgatgtggaaactataggagttatagtcaatagatctggaaaatgtctgttagtaaataaccatctaggtataggtatcgttaaagataaacgtataagcgatagttttggagatgtatgtatggatacaatatttgacttttctgaagcacgagagttattttcattaactaatgatgataacaggaatatagcatgggacactgataaactagacgatgatacagatatatggactcccgtcacagaagatgattacaaatttctttctagactagtattgtatgcaaaatctcaatcggatactgtattcgactattatgttcttactggtgatacggaaccacccactgtattcattttcaaggtaactagattttactttaatatgccgaaataaaaaatttttgtataatatctagaggtagaggtattgtttagataaatacaaataacatagatacatcgcatacttagcatttttataaatatacataagacatacactttatacattttttttgtaaaaatactcataaaaaaatttataaaaattatggcacaaccatatcttgtataggtagtttagttcgtcgagtgaacctataaacagataatagacaacacgtaataataataatgcctactaatacaagcataataccgggagatgggatatatgacgttgtagtgtttgggttttctgaacgttgatagtctactaatactacatgctgacatctaatgcctgtataaccatgagagcatctacaatacataccgtcaatatctctagcgtggatacagtcaccgtgtaaacaatatccatctccctctggaccgcataatctgatagctggaatatctgttgtagcgtttgtaatttctggcgatgtcgtttcgatagcgttaccactatcggcgaatgatctgattatcatagcagcgaacaacaacatcagatatttcatcgacatttttgatggattttgtgtttatgctgtttctcagtgtgtgtttatgacaagattgggaattttatattattaattcagtaatataaactaataatatattgttaattgtgtaaataatataaaaataacaatacaatattgaatgtgttgctgttaaaaatgatcataaacacggagtttattttatatgtctcgcataaacattactaaaaaaatatattgttctgtttttctttcacatctttaattatgaaaaagtaaatcattatgagatggacgagattgtacgcatcgttcgcgacagtatgtggtacatacctaacgtatttatggacgacggtaagaatgaaggtcacgtttctgtcaacaatgtctgtcatatgtatttcacgttctttgatgtggatacatcgtctcatctgtttaagctagttattaaacactgcgatctgaataaacgaggtaactctccattacattgctatacgatgaatacacgatttaatccatctgtattaaagatattgttacaccacggcatgcgtaactttgatagcaaggatgaaaaaggacaccactatcaatcgataacaagatctttgatatactaacggacaccattgatgactttagtaaatcatccgatctattgctgtgttatcttagatataaattcaatgggagcttaaactattacgttctgtacaaaggatccgacgaggatgaactcacttctcttcattactactgtaaacacatatccacgttctacaaaagcaattattacaagttaagtcacactaagatgcgagccgagaagcgattcatctacgcgataatagattatggagcaaacattaacgcggttacacacttaccttcaacagtataccaaacatagtcctcgtgtggtgtatgctcttttatctcgaggagccgatacgaggatacgtaataatcttgattgtacacccatcatggaacgattgtgcaacaggtcatattctcataatgttactcaattggcacgaacaaaaggaagaaggacaacatctactttatctattcataaaacataatcaaggatacactctcaatatactacggtatctactagataggttcgacattcagaaagacgaatactataataccgcctttcaaaattgtaacaacaatgttgcctcatacatcggatacgacatcaaccttccgactaaagacggtattcgacttggtgtttgaaaacagaaacatcatatacaaggcggatgttgtgaatgacatcatccaccacagactgaaagtatctctacctatgattaaatcgttgttctacaagatgtctctccctacgacgattactacgtaaagaagataatagcctactgcctattaagggacgagtcattcgcggaactacatagtaaattctgtttaaacgaggactataaaagtgtatttatgaaaaatatatcattcgataagatagattccatcatcgtgacataagtcgccttaaagagattcgaatctccgacaccgacctgtatacggtatcacagctatcttaaagccatacattcagacagtcacatttcatttcccatgtacgacgatctcatagaacagtgccatctatcgatggagcgtaaaagtaaactcgtcgacaaagcactcaataaattagagtctaccatcggtcaatctagactatcgtatttgcctccggaaattatgcgcaatatcatctaaacagtatgttgtacgaaaagaaccattacaaatattatccatgatagaaagaaaatatctatatgattggagaagtaggaaacaggaacaagacgacgattactacattattaaatcatgaagtccgtattatactcgtatatattgtttctctcatgtataataataaacggaagagatatagcaccgcatgcaccatccgatggaaagtgtaaagacaacgaatacaaacgccataatttgtgtccgggaacatacgcttccagattatgcgatagcaagactaacacacaatgtacgccgtgtggttcgggtaccttcacatctcgcaataatcatttacccgcttgtctaagttgtaacggaagacgcgaccgtgtaacacgactcacaatagaatctgtgaatgctctcccggatattattgtcttctcaaaggatcatccggatgcaaggcatgtgtttcccaaacaaaatgtggaataggatacggagtatccggagacgtcatctgttctccgtgtggtctcggaacatattctcacaccgtctcttccgcagataaatgcgaacccgtacccagtaatacctttaactatatcgatgtggaaattaatctgtatccagttaacgaccactaccggtctcagcgaatccatctcaacgtcggaactaactattactatgaatcataaagactgtaatcccgtatttcgtgaggaatacttctccgtccttaataaggtagcaacttcaggtttctttacaggagaaaggtgtgcactctgaatttcgagattaaatgcaataacaaaaatttttcctccaaacagttaacgaaagcaaagaatgatgacggtatcatgccgcattcggagactgtctatctagcgtcgacatctatatactatatagtaataccaatactcaagactacgaaactgatacaatctcttatcatgtgggtaatgttctcgatgtcgatagccatatgcccggtagttgcgatatacataaactgatcactaattccaaacccacccgctttttatagtaagtttttcacccataaataataaatacaataattaatttctcgtaaaagtagaaaatatattctaatttattgcacggtaaggaagtagaatcataaagaacagtactcaatcaatagcaatcatgaaacaatatatcgtcctggcatgcatgtgcctgccagtcttcagcaatcatcctcatcctcctcctcgtgtacggaagaagaaaacaaacatcatatgggaatcgatgttattatcaaagtcacaaagcaagaccaaacaccgaccaatgataagatttgccaatccgtaacggaaattacagagtccgagtcagatccagatcccgaggtggaatcagaagatgattccacatcagtcgaggatgtagatcctcctaccacttattactccatcatcggtggaggtctgagaatgaactttggattcaccaaatgtcctcagattaaatccatctcagaatccgctgatggaaacacagtgaatgctagattgtccagcgtgtccccaggacaaggtaaggactctcccgcgatcactcatgaagaagctctggctatgatcaaagactgtgaggtgtctatcgacatcagatgtagcgaagaagagaaagacagcgacatcaagacccatccagtactcgggtctaacatctctcataagaaagtgagttacgaagatatcatcggttcaacgatcgtcgatacaaaatgtgtcaagaatctagagtttagcgttcgtatcggagacatgtgcaaggaatcatctgaacttgaggtcaaggatggatttaagtatgtcgacggatcggcatctgaaggtgcaaccgatgatacttcactcatcgattcaacaaaactcaaagcgtgtgtctgaatcgataactctattcatctgaaattggatgagtagggttaatcgaacgattcaggcacaccacgaattaaaaaagtgtaccggacactatattccggtttgcaaaacaaaaatgttcttaactacattcacaaaaagttacctctcgcgacttcttctttttctgtctcaatagtgtgatacgattatgacactattcctattcctattcctatttcctttcagggtatcacaaaaatattaaacctctttctgatggtctcataaaaaaagttttacaaaaatatttttattctctttctctctttgatggtctcataaaaaaagttttacaaaaatatttttattctctttctctctttgatggtctcataaaaaaagttttacaaaaatatttttattctctttctctctttgatggtctcataaaaaaagttttacaaaaatatttttattctctttctctctttgatggtctcataaaaaaagttttacaaaaatatttttattctctttctctctttgatggtctcataaaaaaagttttacaaaaatatttttattctctttctctctttgatggtctcataaaaaaagttttacaaaaatatttttattctctttctctctttgatggtctcataaaaaaagttttacaaaaatatttttattctctttctctctttgatggtctcataaaaaatattaaacctctttctgatggtgtcactaaaatatttttattctcattctcattttctctttctctcttcaatggagtcataaaatatttttattctctttctctcttcgatggtctcacaaaaatattaaacctctttctgatggtgtcactaaaatatttttattctcattctcattttctctttctctcttcaatggagtcataaaatatttttattctctttctctcttcgatggtctcacaaaaatattaaacctctttctgatggagtcgtaaaaaagttttatctctttctctcttcgatggtctcacaaaaatattaaacctctttctgatggagtcgtaaaaaagttttatctctttctctcttcgatggtctcacaaaaatattaaacctctttctgatggagtcgtaaaaaagttttatctctttctctcttcgatggtctcacaaaaatattaaacctctttctgatggagtcgtaaaaaagttttatctctttctctcttcgatggtctcacaaaaatattaaacctctttctgatggagtcgtaaaaaagttttatctctttctctcttcgatggtctcacaaaaatattaaacctctttctgatggagtcgtaaaaaagttttatctctttctctcttcgatggtctcacaaaaatattaaacctctttctgatggagtcgtaaaaaagttttatctctttctctcttcgatggtctcacaaaaatattaaacctctttctgatggagtcgtaaaaaagttttatctctttctctcttcgatggtctcacaaaaatattaaacctctttctgatggagtcgtaaaaaagttttatctctttctctcttcgatggtctcacaaaaatattaaacctctttctgatggagtcgtaaaaaagttttatctctttctctcttcgatggtctcacaaaaatattaaacctctttctgatggagtcgtaaaaaagttttatctctttctctcttcgatggtctcacaaaaatattaaacctctttctgatggagtcgtaaaaaagttttatctctttctctcttcgatggtctcacaaaaatattaaacctctttctgatggagtcgtaaaaaagttttatctctttctctcttcgatggtctcacaaaaatattaaacctctttctgatggagtcgtaaaaaagttttatctctttctctcttcgatggtctcacaaaaatattaaacctctttctgatggagtcgtaaaaaagttttatctctttctctcttcgatggtctcacaaaaatattaaacctctttctgatggagtcgtaaaaaagttttatctctttctctcttcgatggtctcacaaaaatattaaacctctttctgatggagtcgtaaaaaagttttatctctttctctcttcgatggtctcacaaaaatattaaacctctttctgatggagtcgtaaaaaagttttatctctttctctcttcgatggtctcactaaaatattttttattctctttctgatgcatcaactatttcttaaacaataacgtccaacaacatatactcgtcgagcttatcaacatcccctatgcccatctaggttaccagacaattgtatatcataaaataatgtttataatttacacgttaaaatcatataataaaacgtagatcgtataatattttttggtatataaatgatctagtaaaatccatgtaggggatactgctcacattttttctttggtacaaaatttcacacaagtttttatacagacaaattcttgtccatatattttaaaacattgacttttgtactaagaaaaatatctagatcaactatctctttctctttctctcttcgatggtctcacaaaaatattaaacctctttctgatggagtcgtaaaaaagttttatctctttctctcttcgatggtctcacaaaaatattaaacctctttctgatggagtcgtaaaaaagttttatctctttctctcttcgatggtctcacaaaaatattaaacctctttctgatggagtcgtaaaaaagttttatctctttctctcttcgatggtctcacaaaaatattaaacctctttctgatggagtcgtaaaaaagttttatctctttctctcttcgatggtctcacaaaaatattaaacctctttctgatggagtcgtaaaaaagttttatctctttctctcttcgatggtctcacaaaaatattaaacctctttctgatggagtcgtaaaaaagttttatctctttctccttcgatggtctcacaaaaatattaaacctctttctgatggagtcgtaaaaaagttttatctctttctctcttcgatggtctcacaaaaatattaaacctctttctgatggagtcgtaaaaaagttttatctctttctctcttcgatggtctcacaaaaatattaaacctctttctgatggagtcgtaaaaaagttttatctctttctccttcgatggtctcacaaaaatattaaacctctttctgatggagtcgtaaaaaagttttatctctttctccttcgatggtctcacaaaaatattaaacctctttctgatggagtcgtaaaaaagttttatctctttctctcttcgatggtctcacaaaaatattaaacctctttctgatggagtcgtaaaaaagttttatctctttctctcttcgatggtctcacaaaaatattaaacctctttctgatggtctctataaagcgatcgatctttcttacactctagagtttcctacagtcatgggtcacacatttttttctagacactaaataaaatatttaaaatataatattaatgtactaaaacttatatattattaatttatctaactaaagttagtaaattatatatataattttataattaatttaattttactaattttatttagtgtctagaaaaaaa
